United States Patent Application Publication US 2005/0108791 A1 - sequence listing, part 6

SEQ ID NO: 22572 - protein, 831 aa, Rattus norvegicus
MSFLMALLTQCAGEEKRVGTRTVFVGNHPISGTEAYIAQRFCDNRIVSSKVTVDTPTSPVTSGLPLFFVITVTAIKQGYEDWLRHRADNEVNKSTVYIIENAKRVRKESEKIKVGDVVEVQADETFPCDLILLSSCTTDGTCYVTTASLDGESNCKTHYAVRDTIELCTAESIDNLRAAIECEQPQPDLYKFVGRISIYSNSIEAVARSLGPENLLLKGATLKNTKKIYGVAVYTGMETKMALNYQGKSQKRSAVEKSINAFLIVNLFILLTKAAVCTTLKYVWQSTPYNDEPWYNQKTQKERETFKVLKMFTDFLSFMVLFNFIIPVSMYVTVEMQKFLGSFFISWDKDFFDEEINEGALVNTSDLNEELGQVDYVFTDKTGTLTENSMEFIECCIDGHKYKGTTQEVDGLSQIDGPLAYFDKADKNREELFLRALCLCHTVEIKTNDAVDGPIEGAQFTYISSSPDEIALVKGAQKVHSHEIDLTKVHVERNAMDGYRTLCVAFKEIPPDDFERINVQLIEAKMALQDREEKLEKIFDVIETNMNLIGATAVEDKPLMGVFALDGSRPSGLYVRDLQVCLVQELQIRSKLQDQAAETIEALHAAGLKVWVLTGDKMETAKSTCYACRLFQTNTELLELTTKTIEESERKEDRLHELLIEYRKKLLHEFPKSTRSLKNLLEQHINIDALTADPRLYMKITGNAMLQLGPFLYWTFLAAFEGTVFFFGTYFLFQTTSLEDNGKAFSETTENVFCVCSNALFCIYMVGYNSFNIYQPFPRDSPNSSKECAKKECQVLLNLCVASSPVSQQETSTKENSLDVLLTSLLFGTHL

SEQ ID NO: 22573 - protein, 1281 aa, Rattus norvegicus
MEAFHGKIVQLTENSLDATKILDARGRQVMSRLVFYTGSKDNVYDIEDEELYNLEGPGSSRSDAHNCSTNASFPLQWLWYFNTHAPGCSEQQQTKQTYQAKETNLKVRQALPVTSELGADISSLAKFDGIVICEAPNNKLDRFSGVLSWKDSKHTLSNQKIILRGCVLRNTSWCFGMVLFAGPDTKLMQNSGKTKFKRTSIDRLMNTLVLWNVCFSNSGSDGDIKIWYTFSPCLPLISKNKLSTSQGALARPPPPPVLMSISLPNDSLGHHTFIHAFFKVIQHPTCNKCLQEERRRHDANTNVDICTLIHMKDVTKGFGSGGQGNAIGNVPHSPKQAKAHKCHVRSEKKEAVDFSGKSKSERTLHFFDHSLMESIELGDPKVHEFLRLLALCHTVMSEEDSAGQLVYQVQSPDEGALVTAARNFGFIFKSRTPETITIEELGTPVTYQLLAFLDFNNIRKRMSVIVRNPEGQIKLYSKGADTILFEKLHPSNEDLLSLTSDHLSEFAGEGLRTLAIAYRELDDKYFKMWQKMLEDANSAIAERDERISGLYEEIERDLMLLGATAVEDKLQEGVIETITSLSLANIKIWILTGDKQGGFENQMRHHGFLDELESSSVNGKFGYGSQVSGFFPGQLYYRKETAINIGYACNVLTDAMDAVFVITGNTAVEVREELRSCSRSSQKQGMSLSKETAPDFIGTSGEGIVELILHDFIQLQLVGYTDVTAVISQKKCGGMKAKENLLGQNTSFSNGHAVYENKQRLELDSGAGETVTGEYALVINGHSLAHALESDVEKDLLELACVCKTVVCCRVTPLQKAQVVELVKKHRNAVTLAIGDGANDVSMIKSAHIGIGISGQEGLQAVLASDYALAQFRYLQRLLLVHGRWSYYRMCKFLCYFFYKNFAFTLVHFWFAFYCGFSAQTVYDQWFITLFNIVYTSLPVLAMGVFDQDVSEQNSMDCPQLYEPGQLNLLFNKRRFFICVAHGIYTSLILFFIPYGAFYNVAAEDGQHIADYQSFAVTVATSLVIVVSVQIALDTSYWTVVNHVFIWGSVATYFSILLAMHSDGVFGIFPRQFPFVGNARRSLSQKFVWLVVLLTAVTSVMPVVVFRFLKMHLYPSLSDQIRRWQKAQRKERPLRSRRPQTRRSSSRRSGYAFAHQEGYGELITSGKNMRAKSPAPTSGLEKMLYSNTSWIGNLCKKTTDVVSGFSHDKTVKLKSQTFAIVEAKPSAELSGSQGYLALVFPSAHFNRLGGLLGETRGLQLRFNQEGDLSALKFQNSLGDLF

SEQ ID NO: 22574 - protein, 279 aa, Rattus norvegicus
MCYIETSNLDGETNLKIRQGLPATSDIKDIDSLMRISGRIECESPNRHLYDFVGNIRLDGHGACLPDRWAVQGILDYVTSNASILYPSTVPLGADQILLRGAQLRNTQWVHGIVVYTGHDTKLMQNSTSPPLKLSNVERITNVQILILFCILIAMSLVCSVGSAIWNRRHSGKDWYLHLHYGGASNFGLNFLTFIILFNNLIPISLLVTLEVVKFTQAYFINWDLDMHYEPTDTAAMARTSNLNEELGQVKYIFSDKTGTLTCNVMQFKKCTIAGVAYG

SEQ ID NO: 22575 - protein, 646 aa, Rattus norvegicus
MVSLPSRTYIEMCKRYTECLKSTWCSFPVVQQLRLWTLECNSDFPLTIWVVLTIFEVNKKASRALTKSQTESTSRAPALSSAGILLQSAWNQRLPQIDGGGKAFPILVRFGISKAFPWSRVGMLTVRVSINCQFSVERATAKYVFQHIGECRNQSCYDERTGTVHLQGWRCRCLQPRVRVVVSSSVHLGDAPALLCSQLSSAVTCCWSADSQRPQPHVYKWTRCAYPIGQQEHVGAHGGGGRVGFKDEYERFSGTYVNNRIRTTKYTLLNFVPRNLFEQFHRAANLYFLFLVVLNWVPLVEAFQKEITMLPLVVVLTIIAIKDGLEDYRKYKIDKQINNLITKVYSRKEKKYIDCCWKNVTVGDFIRLSCNEIIPADMVLLFSTDPDGICHIETSGLDGESNLKQRQVVRGYAEQFSQVTASVILKRALTQVSKCVKVEGKVEHSNKERVGLSKENLLLRGCTIRNTEAVVGIVVYAGHETKAMLNNSGPRYKRSHGIWLSRYENMLFFNIPEPDGRVLSPVLTGFYVFWTMIILLQVLIPISLYVSIEIVKLGQIYFIQSDVEFYNEKMDSTIQCRALNITEDLGQIQYLFSDKTGTLTENKMVFRRCSVAGFDYCHEENEPRLSDLKPMQVVGHERVSEYLRRK

SEQ ID NO: 22576 - protein, 1501 aa, Magnaporthe grisea
MVSIVSHKAKAPSKESLATDIEPGNPPTAPRQVGARQRASDWFAKVSQEGLFHKPLPPSKDGRHVPIRFAGSQDGDKATHLIDERRGHGYLSNAIRTSRYTLYDFFPKQVWFQFSRLSNFYFLCVGIPQTIPGISTTGNFTTILPLLFFVLLTIVKEGYDDYKRHRLDKVENARCATVLRRASGADEVLETQRQSGWPLPHFLGKHFQQKSWEDRREPAGEGWEWRTVQWRDIEVGDVLRLSRNEDVPADLILVQAENEDHIAYVETMALDGETNLKSKSVPANLTKLASISDIVQSGLEIVAEDPNPDLHNFDGRLTIAGDTAPLTINEVLYRGCTLRNTPAAVGVVINTGEECKIRMNANRHPKAKKPALEKTTNRIVLTLVAYVFSCTAGCSIGYLLWQRSTENSSWYLRGAGVAVQEIVVGYAIHFNNIIPLSLYVTLELTKLFQMLMLNGDIEMYHEASDTPAKCNTNTILENLGQVGYVFSDKTGTLTENVMQFRKMSIAGISWLHDAGLQKPDGLSPVSTSVQVISPTSSNREMAVPTVVMSHQPERRSFVIPEDSEIPYDVPRGRPQETEMFPRRSGLSATSPRRSSLQWRSSGRPDLEQPGLSSADLMEYIRHRPNSAFARAATDYLLALALCHTCLPEYSDDGIDYQSASPDELALVRAAQELGYQVVQRSSHSVTLRLGSTNGGEDTREVVYEILDVVEFSSKRKRMSIIIRCPDGRILLICKGADSVILPRLRQANLALQKVQEVRQSVEVEKEALRHSEAREPRNSLGGRPSLDLRRHGGYADAGLSGPFAKRPSMSDRSKSFEAHSRARRSADLVRPSLQLRTMSFDLKRSRNDPSGSALLSAPALTQLPAKFEVLEDPSVNDDGVVFTRCFKHLDDFASEGLRTLVYAQKFLSESDYASWKKLYSDATTSLVDRQERIETVSELLEQNLELVGATAIEDKLQKGVPETIDKLRRANIKVWMLTGDKRETAINIAHSARICKPYSDVHILDSSKGNIEGQLAGIIEELREQKNSNGLVPSFQNNHNVLVVDGHTLGEMEPSVHLSELFYSLAPVVDSVICCRASPAQKALLVRAVRQKIIQSTPSGKSATRGDTLLTLSIGDGGNDLAMLAEAHVGVGISGREGLQAARVADYSIAQFRFLARLLLVHGRWNYSRTARFVLATFWKEMYFYTGTIAYQYFVGYTGTSLYEMWSLTALNLLFTSLCTISPALWEQDLSATTLLAVPELYTFGQRNLGLDVTKYLSWMLAGVAEGLITFFSCWASVGVFGLTGDIGLYAIGNLAFSIAMMWTNWKLLIIETHTKNIVILGSFLITVAGWWAWQAFLSGSYSPSPSPYAVRGGLTEGFGRDLSWWTCLIVVLAALIVFEMGYKAVKRQLVVGGALRKRQRKAKRVLGRILHRVLCGLFVSTGVAAAAGIKTGDAQADDLRRQEALENEEDLDLELWQELEQDPEVRARLEGLCWVEDEEENVGDDDEDNAEEVQVGRTGA

SEQ ID NO: 22577 - protein, 1501 aa, Magnaporthe grisea
MVSIVSHKAKAPSKESLATDIEPGNPPTAPRQVGARQRASDWFAKVSQEGLFHKPLPPSKDGRHVPIRFAGSQDGDKATHLIDERRGHGYLSNAIRTSRYTLYDFFPKQVWFQFSRLSNFYFLCVGIPQTIPGISTTGNFTTILPLLFFVLLTIVKEGYDDYKRHRLDKVENARCATVLRRASGADEVLETQRQSGWPLPHFLGKHFQQKSWEDRREPAGEGWEWRTVQWRDIEVGDVLRLSRNEDVPADLILVQAENEDHIAYVETMALDGETNLKSKSVPANLTKLASISDIVQSGLEIVAEDPNPDLHNFDGRLTIAGDTAPLTINEVLYRGCTLRNTPAAVGVVINTGEECKIRMNANRHPKAKKPALEKTTNRIVLTLVAYVFSCTAGCSIGYLLWQRSTENSSWYLRGAGVAVQEIVVGYAIHFNNIIPLSLYVTLELTKLFQMLMLNGDIEMYDEASDTPAKCNTNTILENLGQVGYVFSDKTGTLTENVMQFRKMSIAGISWLHDAGLQKPDGLSPVSTSVQVISPTVSNREMAVPTVVMSHQPERRSFVIPEDSEIPYDVPRGRPQETEMFPRRSGLSATSPRRSSLQWRSSGRPDLEQPGLSSADLIEYIRHRPNSAFARAATDYLLALALCHTCLPEYNDDGIDYQSASPDELALVRAAQELGYQVVQRSSHSVTLRLGSTNGGEDTREVVYEILDVVEFSSKRKRMSIIIRCPDGRILLICKGADSVILPRLRQANLALQKVQEVRQSVEVEKEALRHSEAREPRNSLGGRPSLDLRRHGGYADAGLSGTFAKRPSMSDRSKSFEAHSRARRSADLVRPSLQLRTMSFDLKRSRNDPSGSALLSAPALTQLPAKFEVLEDPSVNDDGVVFTRCFKHLDDFASEGLRTLVYAQKFLSESDYASWKKLYSDATTSLVDRQERIETVSELLEQNLELVGATAIEDKLQKGVPETIDKLRRANIKVWMLTGDKRETAINIAHSARICKPYSDVHILDSSKGNIEGQLAGIIEELREQKNSNGLVPSFQNNHNVLVVDGHTLGEMEPSVHLSELFYSLAPVVDSVICCRASPAQKALLVRAVRQKIIQSTPSGKSATRGDTLLTLSIGDGGNDLAMLAEAHVGVGISGREGLQAARVADYSIAQFRFLARLLLVHGRWNYSRTARFVLATFWKEMYFYTGTIAYQYFVGYTGTSLYEMWSLTALNLLFTSLCTISPALWEQDLSATTLLAVPELYTFGQRNLGLDVTKYLSWMLAGVAEGLITFFSCWASVGVFGLTGDIGLYAIGNLAFSIAMMWTNWKLLIIETHTKNIVILGSFLITVAGWWAWQAFLSGSYSPSPSPYAVRGGLTEGFGRDLSWWTCLIVVLAALIVFEMGYKAVKRQLVVGGALRKRQRKAKRVLGRILHRVLCGLFVSTGVAAAAGIKTGDAQADDLRRQEALENEEDLDLELWQELEQDPEVRARLEGLCWVEDEEENVGDDDEDNAEEVQVGRTGA

SEQ ID NO: 22578 - protein, 1142 aa, Anopheles gambiae str. PEST
DDATTSGITLDDSDKRVIRLNEPQVQKYCNNHISTAKYSVLSFLPSFLFEQFRRYSNCFFLLIALLQQIPDVSPTGRYTTLVPLMFILAVSAIKEIVEDIKRHRADDEINHRLIEVLQNGQWHTIKWQELSVGDIVKVLNNTFFPADLVLLSSSEPQGMSFIETSNLDGETNLKIRQGVPTTSRILETKDFSQFRGTLESEPPNRHLYEFNGVLKEHDKQAVGLGPDQLLLRGAMLRNTAWIFGIVIYTGHDTKLMRNSTSAPLKRSTVDRLTNTQILMLFIILIILCIVSCIFNQLWTKRHFQTDWYLGIGNLLNKNFAYNLLTFIILYNNLIPISLQVTLELVRFLQAIFINMDIDMYHAESDTPAMARTSNLNEELGMVKYVFSDKTGTLTRNVMEFKKCSVAGSIYSIEDTPAHFRLRKTTIEWDKTYHFQLITIRSHPFQNILNNHRTAPTLREFLTLMAICHTVIPEKQPGDSMNDIQYHAASPDERALVYGAKKFGYVFYTRTPTYVEIEALGVQERFEILNVLEFTSTRKRMSVIARNSKSEIKLYCKGADTVIYERLAPEGVAYRESTLSHLEEFATEGLRTLCCAVSDIPDDVYEDWKHTYHKASTSLQYREQKVEDAANLIETNLRLLGATAIEDKLQDGVPETIASLLEAKINVWVLTGDKQETAINIGYSCQLLSHSMDLILLNQDCLDNTRSCILEHTSNGRFDNVGRKDAALIVDGKTLKYALSCDLRREFLDLCISCKVVICCRVSPIQKAEMVDLVTISTKSVTLAIGDGANDVAMIQKANVGVGISGVEGLQAACASDYSIAQFSYLRKLLLVHGAWNYSRMCKLILYSFYKNICLYVIELWFAIYSGWSGQILFERWTIGLYNVFFTALPPFAMGLFDKVTSAEQMLKEPRLYAPSQNAKLFNVKVFWRCIINALFHSMILFWLSYKIYEKDVIWKNGRDGGYLVLGNIVYTYVVVTVCLKAGLLTNSWTWLTHCSIWGSILLWFIFIFIYSNIWPALPVGAVFTGMDDMVFTTPVFWAGLLLIPLSALLFDVSWNAICGVLICFNQQQKKTNKQNQTPNYYRLTETARLLRNVRRVFTGRSHTTENKELELKHGYAFSQEEGGSVTQTDVIRAYDTNLPKPD

SEQ ID NO: 22579 - protein, 971 aa, Anopheles gambiae str. PEST
NRIKSTKYTLITFLPLNLFEQFRRIANLYFLFMTVISIVIDSPVSPMTSLVPLVFVIAVTAAKQGYECFLRYRADNMVNFSPVTVIRGGVTVDIRCQDIRRGDIVLMSRDCDIPCDVVLLQSSDEHGRCYVTTANLDGETNLKTMAAPKGVPVVPPDRLHTIGRIEYERPHTDLYSFNGRIELADAYVAAGDHSVLPLATENLLLRGSRIRNTEWAIGCAVYTGQQTKLALNSRMTTSKMSSSERYVNKYLVFFLVLLVVIVTMAKFLGGFYLEWDPDLYDEETDQPCIVNTSDINEELGQVSLLFSDKTGTLTKNIMIFQQCSIAGRKYEQQGRRLLEAGDRRAALKINELPVTTLHFVAFGHLFFDVFFVVCLPQTQVNEFFQALAVCHTVQVAGDYTKETEEDATSPAKEAKETDVLMEDKMDYQASSPDEKALVEACARMGLVYIGDDGDQMQIKVRRSCVRANVRSRLGEIPDEELIQYERLAVLEFTSDRKRMSIIVRDAHGQIWLYTKGAESHVLPLCAHTPLIETTQRHIDEFAKLGLRTLAVARRRLTEQQYRTFHDELIEAGSSLVDRVERVAECQQRVETELELLGATAVEDALQDDVQSTLQALGQAGIRVWVLTGDKVETALNIALSCGHIPDGAARYFITECRTAEQVQQHLDTLALEMFRQRDVPFSMLIDGASLKIALEAHREQFRDVSVRCRAVLCCRLSPLQKSEVVQLMKTAEGAPVTAAIGDGANDVSMIQEAHVGLGIVGREGRQAARCADYAFAKFCMLKKLLLVHGHYFSTRLAVLVLYFFYKNLVFMGIQLYFQIHSLFSNQSVYDSVFLTLYNVVYTAIPVLVLALTEKPYQEQTLLKNPALYQKVAGNKQYAWKYFIGWMVLGIYHFSVIYFFSYAVWIENPAIYAHWPATASFACYGTILIHNVVVLVNLKLLIESIYKSYVFIATVLLSIFAFMGSTFVYNLL

SEQ ID NO: 22580 - protein, 1284 aa, Giardia lamblia ATCC 50803
MGCCCCRPIEGEEEDITLRFRGLAVNYGGRKFLPNVIKTRTYNWISFPFIVLLLQFKPFFSQFFTAVALLQIFRALKVGLAFTYYLPLIFIFLVSIGRELYTELGCYKRDKIANSMLYQILSDSGIRTVRSDELQVGDIIYLAPGQNIPADILILHGTEPLYLKTTNLDGETDYKSRTACFDTTDIYSTDYKDILRKKLDSHILQYEPPSSQLYKFNGKFVLLSAPQDVSMSPVMPISLANTAWMNCTLAKGSVTGLVIYTGKQVRIMLGRKKPKSKSGKLDVDINLYVKGLFVLCIFLAFVLTMAGSVYSLVTFIRWIIILNAIIPLAMKVSLEYGKFTMAGTISYDPEIPGVRVQNSNLVEELGLINHIFSDKTGTLTKNDMWLHEVVGSNKNVTDGCETMLHALMTCHNVELVTERCRSIKVTAKNGIVQHSDQDSEEDQAKQLVPQKTNTRIVLEEEKVIEGFGEAVSLCFTKHTTNEYLLLNNYIGASPDEVAIIRGMHARGHILKEKMHNRIQYSSGTEDYEFELIHVFPFTSETRRMSVIVRDRETQVVYLFVKGADTAIEVISKPCDWMRNVVDQLATTGRRTLVYAYRILSADDLDAFQRAWMSAAEDINSRQDKLDQAEEDLLVNLDVLCVTGIEDQLQDNVKDTIQSLKRAGIKFWMLTGDKIITSLSIAQACSILPNDVISKHTDFCSRVSEIGNSTSRCVELDAQTGDVQHSLHIVGENTSSSAMQLASVASNPITMSPLDPVLITTTCAQERSHSCSSPKSGLRSPLHHRTNRALLRHPLKKSGLRNKKLANIKESAYVRKSQGVFFLTEELSLDRLLQTLHDVLAVVETQKNIAIIIDGGAIDALLGTYPTNYFYRYRIHPITGSLLPLPLILKAWRYFVRFLYVYFTGKAKSGKGSLGPDAKIRELFAEVTCRAETVICCRCTPGQKALVSEIITTYSGKQSLGIGDGANDVPLIQLCAVGVGIAGKEGTQAANSADFVINEFQGLKKLLLWHGRNSYIGSAQMCQFIMQRGITQTLLQIWFSMLYYFVTLVIYTGVLLLGFATFFTMLPPFNYYINEDIDYKLVMQYPEVYRYTSSGRLISFKTFCLWLLASIVISFMIFVSLVCVLPWDVIYTEFVLVSFAALLINQLLLISFTSHRWSVLLVITLVGSYASFYIVQTIYPDIFPLSFLYSFSFTWSSLYIAFSAALPIYIGSLLVKHLSVPPVIKKLRKLRAPADCACCAKKSNCACTKSPIHYYSSTGTYYFNLTDKAANVLTCRYCSTCPRKC

SEQ ID NO: 22581 - protein, 1309 aa, Giardia lamblia ATCC 50803
MIADHPATCYTCDANATVARQVVPIYEDLAACEQGGNVKASRERGKKRKQGTVHKVRINYYPLSQRSSNKFRSSPYTPLNFVPLFLKAQFSRPSNVIFVGIMILNYMPGITIVSKATAVIPVVFILATSLLKDLIELGIRIKNDKVINKAEYGEHISGGKVCSTVEAQNINPGDIFKITAGQTAPCDVLVLASDKNVVYFSQSSLTGEQNLVQKNPIYTSTDIISSQFIGDVEFSFYQGKVFGCYTGPAVEENTQGYVSTAPDLHAAPVSVCIEDVQAIQRARERRYRNAAMSTHHIQMNSVVKRASMGKRPIQPEPIVHSILLNQGNVGFKGTAATTDYYALALATGENCMSTYTAHKRESRISNGAKRLQLIIIVQCSLVLVFVISFSSVVTERYQGYIERYPYLEIADQFASKAGAFFISFVSYIILFSYALPICIFVTIELLNILNRLFVRSDLNLIHLYGSCTVNNDKVLADLSRITHIFTDKTGTLTRNQFTYHSFLGVDECRRLSTESILKSIYALGENRANDADLNVFYGNYASQTPQHTVDTIQNRVLQLVALGLCNSLIPVKSNGRLEYFGESVEETCYIRYLSTNGILSIVEKTESTVRLALSRSFIETGNVSSARIQTVRLSNTFESVISDDYSIDKYVLLDFELLKVYEFTPSLKRMSVICCQKASHETTSCSMYVVNGMRPFLITKGSHVVMGQLMNRIPMAEGEQSTEQPQSLSIENIITKNLADKRCFVFAFKPFPTLPNVKTEPQQSVEQGSNFLGISVIEDELAPNVLESVKKLRFAGIKINIVTGDSIETTIETAARTGIIDVDTNKVIITRMDEIAVRKAELQDEEDQRYCLVVSGEVINEVFPNLERRAQINAFLRKGKLPKKFARQYFKDTGVECSHEPKVSLDLMYLISQANACLFCSMSPESKKVVIQYHSVYISLQKTRIKLWCRGKSPSVGASLAIGDGQNDLQMIDAADVSVGVRGREGLYVANNADVSVPSFSTLVRLILVHGVLIEQRMRMTIFYNLYKNTMLAIICGFYSGESLFSSVLIINDFLSLMYNVILNFIPIFIYALSEQHVKPRYLENFPTIYRTNCQPWRYWFEFVTFYVSGIYMAVIIYFCTAFMFGNSAILGTSGRVADTTVFSFIIITVITFVSLARLMIASNYYSTAFAWSIILSIALYYFTLVGINYTFFFTQYFFNTLTVASASLSYYLQCLVMIIFCLVPDIIYSTLSRLYINPDPNSLLTHYFKKETKGLGKRKDIQLELRYKRCLEEVIRSIQTTAKSSKEQSQNAIFCTESLEVDVKQEYN

SEQ ID NO: 22582 - protein, 1560 aa, Giardia lamblia ATCC 50803
MARPKCCKCNSLCCKRSSKRTSSASGDKQNAILFNFFDEGIAKTNHISTCKYTWYNFIFKFLIEQYQRPNNIFFLTVLLCNSIPGLAIVGFGTLITPVIFILVISAVREIIEDIGRSRSDKISNSKVYKIVRKGEVLSLPASKISQGDLVIIRDGDEVPADCLLMISSSQTKTAMVNTASLDGESNLKPRNVILTHLSPYNNELELLSFLRTLWGRITAYPPNSNLTLFTGKVSYHWSPYGIGFHDPGARAGTANDFAARLAIKSMALYAPPPAVAGGYSGVNKTPGNLKSMASPFSAVYVSARYPSYQPSSPSAQDTVPGTGPLGVRADNLLSTAGISNIAENSEDGDSILNDASVGNSSHTFVKPTSGCAGSLAIDLDLAVTSSEPTEVAKDLTSSHGFSIDKLDSVVPRVTSISSKASRDSPVDQAGRDMATRSSITTTPRTGFAASVAQACDRANGELPLTETLDLVSAFPLTNLAAGPNYTTDNTHKLLHFNTDNTLLKGMKLQNTELAVGAVIYTAYDTRLMMNQTKPPLKLSHVQKRLDRVLLLEILFLVAGVIICGAIAAATNGDYLTRYPYAGFPNTKKFGTFLMRGMSYAVLFSYALPMSLFVSLELVRLVQGIFIEMDTRLRKAELLPQLDKRAYDPLPPAKVHCVVKASALIEDLAEVDIIFSDKTGTLTSNEMIFHSFYTLFDGVQCVYDTVIAAGKLELCTISHSTLVLEAKEEKNHVSDLMTYALALCNTIIVSDKGGTLVYQGESPDEIAFAKAAAAFRLVITGREAEYVRYNYSFSLNEDSVAPRQVSVPVTYTFPVVVPFTSARKRMSIVLCEEGIEPSEHFTSMIAPYLVNGSPCPTPDPKDVVCFPRFSYSRSKRRVFFTPIQLCTVPGNPFLLSKGADSFLLPYCKPILGENPMNLPPIKAAIDNFSCEGLRTLVWAVRELSPGFLDNFLKTWREVSIKPDSDPEYISHTKRLERDLTFLAASAIEDRLADMVPETLATLLSAGIKVWMLTGDKTQTAVNIARSSNLAPAESEWLYLTHEEVTLMEEKLKQGEVVAPPISEFVLEKLEKSPTKNKLLALITLLDAFEKRVSPTVIKERRKLIHRRVEDAAEYNTYDTSEHPQDRKPSGAQQPTSDVSSVKQKFTKFGRQLKDAFSFTELYRKKKEYKTTVPFTTVIDSDVFKLIYMNNLHDFLLSVTMHSTAVVCCRLSPEEKALIVTMTRNRDKYITTLAIGDGANDCPMIKSANIGVGIAGNEGLHASNSSDFSLPEFKYLRRLLFVHGHYTHLRNSELIEYCIYKNLILVFVNGLFSGQCLFTSQILFNDMMVTMYNIVLTFFPIFIYALTEHDIKDRVLEVHPRVYSVFEKKPETNIKSIGLRILIAFYHSLCMYFLTRFAISYNVTEMNGHNIDLTLFGYYLLNELIFIVTIKICLQTKYWSWATLIALIFTVTVFVILLLLTNYTTIITETLLNTMSFASHTLHFWVTVSSVVFAALLPDVMYTFIRRFYFPNSHDLLYHQYRHLKRNCLGHALDVGRDIERVEKMDNCLEEVQARLRQSDQV

SEQ ID NO: 22583 - protein, 1432 aa, Giardia lamblia ATCC 50803
MPPELQKSELFEDYSRIEALVNAHNDQLAKQKEEEVALALKKRVSEIDDKPVIAPVAGPLALAQPIVPFNRRREDSAPLLPYTTMDSELKQPKRTSLVRRLKSKGSYYLANSKRALRIGKKYKAGGRRRPEKTYPARSIFLNSHVSHPSPKNLLKNNKYNIITFVPKILYQQFKYFFNLYFLGITISQSIPILRVGFLFTYLAPLVLVLAVTMIKEFVDDIQRVIRDRAVNREKYHRLRSDAVSVNDVEQVLAQDIRVGDILVLRSGQRVPTDCVILHLQNDGNSVEECFIKTDQLDGETDWKMRKALNFTQGKGIEYLRDVQTRAIFEIEAAHKDIYGFKGRANYVSSDNSVITESISLENTIWSSTVIASPSTTVALVVYVGSESKTRLNTNAPRVKMGFFDKEIDMRAMNLFWIQFFGAALYSWLGGNSPWTSVYYVIFFRYLLLFSSVIPISLRVNLDLAKIITSLMIRRDKSMQNPIVRTTTIPEQLGRIGYIMSDKTGTLTQNIMTFRSLHTGKSSYETLTEDDYGSFRMALKRAYRSQADVSRDPDMSIPAGVASMQHSSLPIHGQAFGNEQITMRRQVHGNVYSLIPQMKTSSVSNINDEQKALITALRMMALCNTVVPIERSAAQDDADFLIDDATIAMWSSRHLQSLAASDSAPSSTEVMRALQKNHLVQISTSSNCPPGIGGGINPDISYYTLQASSPDEISLVKLAAELNLTLMHRDRTSIVLQNPLGEPEEYTILYTFPFTSTTKRMDIVLESHLTGEILVLMKGADSVVIAASNPSPWASEQVSTLASKGLRTLVFAQRTMTRDELSAFASLYKTANEALDDRQKHIDDAENSILHSMDIVAATGVEDKLQEDVKLTIQQLRDAEIRIFLLTGDKSDTSMCIARSTNLVSPNQRFHEITLATYAAAVSGTAGTKGSYSGMEVFTKDSCGPSGRSTENSISVTMGTAGNASSGNAGSTDVSNTRLLEYISSELNKIADSGYECAVIIDGTILSEIMKTLPDSSLKEFRGEVVTKEELQHEKELDLATRTQSRGSRSGRAGCCGKDRNSKFGSSVAKQFITTIARCPAFVCSRCSPEQKSIITKMVANLHMEHMCCNPRCRCGAPKVGVLAIGDGGNDVSMIQSAAVGVGLVGKEGKQASLASDFSLDRFKDLSSLLLYHGRLNYIRGYAMAHYVFSRGMTISVMQAVFSALFAFSTIPLFTGWLMLGYTVVFTSLPVTIICFDHDLPKDYLVRRYPILYKDSQRNKHGLVSCFFKWLCVSIFQGSVLLMFSQFLINGGLHGSLDDGANFFNLVGTGYTSLLITELLTLGIGIYEWSPFMVGSGILSFAIYVAAMFIMPEYFDKRSIVTLTFWFRVVLGACAAVFPPFFLKWIRMRISPTDAEKLRRQWLVDRRRERNTKCCKRAGSLTETSMKGNDDPL

SEQ ID NO: 22584 - protein, 1555 aa, Plasmodium falciparum 3D7
MSLVYRKTLNFLKGKNEDDKDVKININGENKRTCNNSVITSKYTVFNFIFLNMYEQFHKISNVYFFFIGILQVIPQFTATNGIPTVFFPLLIVLTANAIKDAFEDWNRHKTDKIENNRMCYGIVSEEEKKIYQEKSNKKNIFKKLKRYFFGNRKICNTENYYDEDDMCDDEITDINDYINNYEDNLENIEGTVKKRWKDIKAGDIILCRRSEFFCADILLLCTSHKNGIAFVETSSLDGETNLKVKEANTFLFNILGNDRNSAIDNVKNLKGFILSDKPNKDLSTMYGTIYFEKDKKIDVENIGIQELLKKTTEEIEYRKKRLSSVDLSKSSSAIGSNLCNNNNKSDSKSDIKNYNKDDDDFDDMDENNILKNDNYIRIPFDEKQFVLRGCKLKNTDWIMGIVIYVGRETKIQMNSSKSIKKTSKLEILTNKMTIIIWVIQMIICLISAYYNAIIVSSSRKNRFRYLPFNLEKAKKPYIVGIISFFSWVVITGNFVPISLIVTMSFVKVVQAYFISCDKNMIHKVQADVPSFGEQKEIPNIPKDDISSDADVIKRMRTKKIADSSLLHIDENQTEEDNMDMKSDCIAFKNNSSHQNINGNNKQYSSSSLGIISNAPKREISSRVISFKDSKEKNYIYFNAVPRTSSLIEELGQIEYIFSDKTGTLTCNIMEFRKCAINGISYGKGLTEIKRNILKKKNLEIPVEPTMKFKKKTPHVNIIDNDIINHLKDPNHFNHVNLINFFLHLAINHAVICEKDKEGVTTYSSSSPDEEALVNAAKHFDITFLYRREGKYGISIFGKIYEIDTLATIEFTSKRKMSSVICRIPVINPDYNHPTDAKSSNMDKKKNNMDDHLVVGKNEEKEETDDLNVYPPKKEAHSKLNNNNNNNNNNNIRIDNLYDDKNNFNIIYNHNEGRTPEVITCKNSKNSKIMLFCKGAGSIILKKLAKRTDVDEITIEHMETYADEGLRTLCIAQRELSEESFAEWYHLYKEASLSIKDREEKLESVAEYIENDLILQGITGIEDKLQEGVSSTIEDLRMAGIHIWMLTGDKIETAMNIGIAANLIDNYSEQFIYTEEYIESEEALIKKIDDDILMVEKSLNIPHYNFDDENNNVEDEKRKTFFRNNFIKNFFCAKNKSGLLLNPDKYNMLINTLNYVLVVDGSVIDLLLSEKMERKFFYLADKCSSVICGRVSPYQKGAIVSSANRLLNKITLAIGDGANDRNMINTANIGIGIRGQEGVQAFNSSDYGISQFRFLKNLLLVHGRLSYRRISKLVVYMFYKNMVLIFPLFIFGSISLYSGQKIYFEFLLHLFNVLFTAIPVVIHAVLDQDISLNTAMEKPNLYKLGIHHYYFNIRTFISWVMNSLFHGSVVFLIPLYFLSYYNIPTSDGIPYDIWTVGCATYFLTVLIVNFKILFETYYLNILPISGIALSIFSFVLLVTAFSFMCVGSIHLLGTIVYLVQSLRFWLVVILGLFTALLRDYVFKVYKRNFNPEIYHLLLDQENAKIGMNDVIDQLKLNEFDKDDDIRIEKSKSLGYAFSEADPACIQLIRKQDNMI

SEQ ID NO: 22585 - protein, 1618 aa, Plasmodium falciparum 3D7
MVDDEELRKLRFLLSNKGGRIKYFFSYIFYKLFSHIYNKKNKKRERFVNIHGRTFPNFFCDNKIKSTKYTILTFIPLFLFYQFADFLNLFYLCVSLLQIIPIFNTGYVFTFVAPLLFIIFISLINEVVDDLKRFIKDLENNNEIYYSLLENGNFQKIYSKDIRVGDIILIKSKQRVPADCILLRNLNKNEESNFKVEEKRLFNCFRWNKSNNVYNKINKSYYHFNKNIDNELIDDRYNESNNNCSETSNNLLFSENEKSQKKGKKKQKKKLMLGDNNTNMNDFNFNPNDQNNNMSNQLKKKKKRKKKNNKSKKNININETTNETANYTYVKTDKIDGETDWKIKYPINIFQNLKRLKDFFTIDILFILEQPKNDIYKIEGSFVIFKYNPYGDFKTTENNNHSLNDNQLLNYSFDMAKEDEGRVQDDEDVDEDDYDDDDDEDDDDDDEDDDEDDDEEDDDEEDEEVNIPNNEKNDTQNLDDKKSVRRIFGTKNNTYSYGDDDQVQNEKKKNLDRGYLNLEEKDTDYAYNKKDKKKEMVTFIDVEKGNNERTINLNKKKNSVNTTGNRSSYVNDGKMCNVFNNEDNFNFYNVNYRKKLNYDNFILFNSVITSSDVICLVIYTGSDTRVNMSTQISKIKRGMIDEKLNLITLFLFIILTLFSIYMCSVKLNNLWYLNFIRFMLLFSSVIPISLSVNLNIAKIYYTLLIQRDKEVESTIIKNSGIIENFGDIDYIFTDKTGTLTENVMVLKVIHIGFDVIHAENEKNSIQGNNMETKQKGNYNKKMLSYNLDDMNEDVDDTSIYLASSNYSKHDRRNKNLRNGELASFSYEMENTSNINNNTKLRNYTKSNHHHNNISDNELYDEKNYNDDQRSLSNYSDTSYGDVHLKNYKQNNMILNQNMGQNRNETLTKNNNNNNNNNNNNNNNNNNMSLEKKKKKVEKMVDEFLKYKSDPLDYYNDNIDDIEYLKRHRVFQTFLSFLICNNIRTLTKESSNKEKEKTKKKKERKEKDFQKNLYYILKVNRKKKDVQKNKKENNSDNVKSSTQNKKKKHFSSNSSEDSETFSHSDVSYQCSSPDELAFLKYATNCGFILKKKTASKIEIKYKNIMLEYDILLHIPFSSETKRMSIFVRNVKNRNIYFFIKGADNVLIKKCHEKYKTFIYEESDHLSNIGLRVLVHGCLNVEEQFFHNFSALYNKNKDVKGQLENILEYVEKNIKVLAITGVEDKLQEGVGKTIEMLYNSGIKVWVLTGDKIETAICICKNANIKKKKHNIYIFRHENIKSTSNLIREFNSILHNIESYVLFFDNIIIQNCIKYIPNAFVDFAANARAVVCCRCSPIEKKEIAILIKTIKKKKILCIGDGGNDVAMIQSADIGIGVLGKEGKQVVHDSDIIVSKFKNIKKLILYYGNNTFLQTSSLCSFLIHRGFILTYLQFIYSYIFFSIPVSIFQGWLQIGYTTYYTTAPFLSLLLDIKIKKNLIYLYPEIYKNKKHKRKLDLKSFFIIVWISIFQGTVVMLGALKLFNDNYNNLINISFSSLIVLEIMNIHLEVESWHPLMISANICSFIVYIFSMFILRNYFDIMQIMSVMFWYKVILIVIFAWLPFFIIKKVKNIITPSQFFKLA

SEQ ID NO: 22586 - protein, 4226 aa, Plasmodium falciparum 3D7
MSDSKKHYNESNVRYKVKYSGKIFGNNMKKLNENNNHDFTTAEAAWMEKKKKLYKDTNNQPLWDFRKIQINPTETDELISFPSNKICSKNYGKYSFIFKGLYEQFLRLPNIWFLLISLLEFIPQYQNLSNYMYYSKHSSFFLLLFFICVSIIKNIYEDSRRSNIDYQINNRLCHMLDGPNSQLKAVRWMELSVGSIIRLIENEQVPADILLLSCNNSEGVVYIETSLLNGETNLNKKYCVNETRNETSIYAISNIRGRIVCEKPNSNMESFNGSLKLDAHPRATSLSINNVIFKGSHIKNTEYIFGVILYTGNDTKIMKNISNNKHKLGYVNKELNSYTIIGLIFTFICVFISVLFKWTEDDKFRNGSHFFLITVKDNICESIVKYTLLYSNIIPISILISVDLISILQSILIENDNHISTFENYETSEPSTIDDMDNELGDFKMDKSHTFFKKYTYFLNNRSKNFTNNRYSSTNTERASDFRKSFFGTFDKLKTIKRYFYSIKSKIKSISQSNTLYNKSSAGGSIIRSDKNKQTTFSKSFIDIFQRTNNNEHSQTLDNNNNNDNNNNNNICKEKYQNVNNSKNVYVSEDSSNNKYKQNDYLQKSQEQNEIHSINNNNYNNKNDNNLQTEFSNHNFRINAYKTNRTTKDDTYNNKHISLNSRSKSNQKGILINSNEINRKKKKNLLQKIFPFFKKKRTNISEDLSKYVFRRSKQLNINHNNSEKYNLNDYDEYGWGLCLNSNMHGDLGNVDFIFTDKTGTLTNNNMTFNMCSIAGKTYGSKCKNKKKIYNNPKSNNDNKLNSYDKNIFKNKFSSEASIKKISFVRDFSNNVSSKNDLTLDDPTELISDEGNNYLRDKYEHTSDKKNDTNKNRDGANNSNNNNNKDVSNNKNKNNNNYNYNSNNDYIKQNGECNIYNNQNNTNNTHNNNIYYDEYNNTNEGNMKNTNVNKDTNSKCNKKDFIINTSDIINNNNNNNNDQKTNNLKYKSSSSWNSKAKKSSYINLNSYNKYQSFQNSSMLSSSLSSTCSSETEDENGSQLMYYSSSNYDNLDINNDMDSTKTYSHYTEQNYYNSVKDDKDINSEHQRYQQKKTNKQTKNIQQNQCDQWEDNRYTQESIKNQYFFDRNYQTFLMKQNFPRPKSFRLNMNSSSVKGRCDFNDTKIYNDLNSQSWRGYYIDEFFKCMTLCHAVTPFIQFDYIRNKHLTYTNSRSSKGISNNMDRYNINPTTTTTNNNNNNNNINNINNINNNNNNNNNNNNNKQFSCDYMKNRNDIIFETSTDYYANQDNAKRKREKTLFDNVSHCGEIQEYRDNKKYRMKRSQTCSNNRKIFSNQRTLYDYRNMNNNLKNKNSYLRNKLKSKIFLDKSYRKRKKSSGTYKGSDICKGIEKKETRRWKRFLHMKGSNNRNIFSRIKDFKSNSIIYNNQDKTNDYKNGYSNNINNNNSNNYTNEKINRSFNKRHSAVSFKQMSKEKLIPINNVLSNRCDVESYPNEELSFSKKKKKNSEIVSFASGKSDIGFEERTDAGIAGKNMELSYNELEKYKYVKHIDSNNKYINNNNNSIHMSHMSSNNNTFESHIYFDAIKYQSSSLDEECLIYSSSFLGYRLVLRNKNTMCIEIDGSFNKWTIIGVNEFTNRRGKMSIVVKPDSMESGSILYVKGSDSSILSLLNLKYSKFLDKKYSRKRRNKNIQKYKQKREEYNELKSKDINIEEFQKSKSLSLKNFKNNTPKVLFGECTLDNNNNNINKNYKYDKNDKHNNNNNNNNNNSNYSYNYLHDSNNLDAMQNQKYSYAYEDKEDYYYTNNGECNKYKERYRRLEKQLRKFSVKGLRSMIFAFRYLSEEETIKYKRMYDDACSSIYNKEQRLEKVAEEFERDLIYLGITGVKNGLQEKVPKTIDILNQSGIRIWMLTGDNVEYSLHVSFLCKFLNKHTKIFHAALENSNAKKLKREGMALYELFQLEKEEKKPYENLCLLVNGRNLQTFLNYTDLQTHFLNMACTCDVVIACRITAKQKAFLVQLIKNRLYPTPNTLAIGDGANDIAMIQEANIGVSIMTSDCIISAGYSDYCIKKFCYLRKLLFIYGSKHLYTISIILYWNFFKNILLILPIFFYQAYASWSCVKIYPELLYTFFSIFWVFIPIIYYMFLQHNLNYDILYNIPLFYALSRRRYNMNCFKFLPWIFEAIFYSMIIYFFAYAALKENSHLNNGEVITINTFGNICFIGCLLISILRLFLEGSLWSPSILITCFGCFLFVFFPSLLFICFAYLSNEYIREVFRQTFLWAPLYVLLILWFSTCIISYIFINFTKSILFPNIYNVVNHWLFEQYQEKHNKNKYIFSLSGKNKFLKLRKLGKKIKFKFKRNYSKKYDTNVIREHPLLHHTFKSEQDQNKCNEQFSKDPFISNSLLKSKNCKFKKDSSYSKSNIHVDEEQTYKGLKVVLSEQVVHAKENLVSFKNEKKNKNNKNTSMNVNDNIIIKNNNINIKNNDNNNDDNDNDNNNNNNNNDNYNNNDHNKKEFKQKHIQNNYENLFNHTQVENNLIKENLSIRNDNNRRDNKNETDYIKQSDEDYEMNPSITSLRKRECINDSKYIDNKSYDNKISNNHEEKDGFKSDDRSLINSNMMDYKNEFTENDTTYSFNDSHMFYDFPSNSKTTKDYKVINSRIDDSIMADMKNCLNPLKNTFLVDLLPPGKRFRINEDHIYFKNNERMENIPEALDVNKKYYHIIQNKAEYYDNDSLSEFSYTSSNSSINNKKKNENTQKEIVKVSHLINRFTLAFKDMQLESGFQIHKKNKFYKTFTPWYRFIFLLLGVFFLYVWKLESSLSQLWNMPSDASTDVFILFLSLLLELVLLAATVTTFFSNIFIENFNKIISAVVILIITYHVVSYSVTHIDGVFQAVLFPLYTFVILRLPFVNAVLCNIIFLGLFIIRFNGDHFLDKKGLAHYIPLFIGVDVFVGFVGYRLEYNQRKNFLLEYSVESSRRKQREILNTMLPPFVVDEMIYSELNEEGIPISLKAEDISTVTIIFCDIYDFQNIVASIEPTRLVEVLDRLFLCFDKCTEQFNCTKIETVFETYLAACGLVKREKDEDELENNKYSNNNKNNNNNYYYNRKKKKKKNNNNNNNNNNNNNNNNNNNNNLNNNNNNNNVNTSDDDGDFFEEDDANNHQIYNQMKGQEDAHDSIDFALSILHVSSHIKYEKSKMMLKKNDSFEDANDDTHNVNDSFNNDKAENDNTNTDNNKPTRIRVKVGIHSGRIIAGVVGSKKPQYALFGDTVNTASRMKTTGKPDYIHISEATYNLVKDDKTLIYEKKETEIKGKGIMTTYLLTSVIGLNYPFLGEHVEKKGHFISELYEDDLSNNLNYDKTQNILGYYSNKINQNNDSNINEGIINNNMNTFNTIDGDTSNYYVNLKDLSLNDLPNEYIKDVNTHYCEIIKLRNLKIGTAVGYQLKQKDFYNMTFLNNGLNNDTATNFNQYIESHKDFDDIKDLRIGMNKLSISDSLYYLNENVIRNEPINEYKNKIKINSVNTNKKSYEDAHLNAGNIIYTNNEYPNGQNIEEDDDLLLTNHYNKTNVNNNNNNNIYDVSKELIEHNEEDYKNILMCSKRCKNCNETYCTPNDCNNNDHVYHVMYHRKLSNIKKNYLKNIRKDANIKKDIEKEELNKIHSNKKSFNFFYLFSYIFKIFPFIGKINKEEKKNKSYKKGEQDKSSKRIIALNSEWIFLKFSDKNLEAKYRAHFYSNKSNINSIEQALIIFLVTFVMQTLISSTVSIVFIDHKRATQTLHINYFAYWSVRSVYTFFGFVLWLLFHYRTRPEVSSLLNIKWMIFFLNLLFISAACVFSIAYLWAISETDQTTSYTIWMTNDTIEFFFYLVILHHNTGMLFQTCILVDLLFITMSLTFIATSVVKTITTDSTVLLIPWYVAFNLISTYCKESIDRRTFYANESAKKTENRATELLNDMLPKHVLEEFQQDKLKLAYTHDRLTFLFADICGFTSWANGVDASEVLTLLQKLFAKFDNDSTKYGLYKLCTIGDAYVAISEPVTEDNKDYDPVDGTERVLEMAYSMIRIIKEIREKLYIPNLNMRIGLHYGSCVGGVIGSGRLRYDLWGIDVLTGNLMESNGIPGKINVSETLKNFLLQQFKNRFIFKPHTTIRVIYKDVKCFIITDKKEVESSNHSKLLQNKNYLLNKKFSTQNYLVKNIFAKKKHSSISSSKNIHSYDEKKKKKNDLFYINVNDRQSNL

SEQ ID NO: 22587 - protein, 1864 aa, Plasmodium falciparum 3D7
MKILEWISCTIKGKHNENKIYLISNFEFNKDDHEYYIKNAENRIKEEDLNIDIIYGKKHKNEIRTAKYKLYSFLPLIVFFQFLRLGNLYFLSISMLQLIPEITDSKGMPTYLIPLVFIIVVAMIKEFFEDWQRHKSDNEENSKKTMVFVQGELKEKKWADVKDGDVVKIFSYEYFPADLIVLNCSNKKGIVNIETKNVDGESNVKQKYCLPDISKYFSDDKTAGFCRIELISERPNDNIFDYKGYMILPPLQYKNMKNGKLIHFYNTHYKMDDHKDEHDEKGTGKYINKNYKNDYNDKHISYNTNEQNNLSDMTKNDPKEYDYNPQNEINNNNNNNNCDNNNNNCNNNNRFFVDDIKKQGQNEETVDKKKSFFIINNQKKVYDTGSSNNDQITHINNDVISEKKRASRRRTLYNKLTFNKSFFNNKNENKKLNKRNSTLSSINNNNDNNNNNNNNNNNIHNREYDGEEQTLKKENFFFKEYKRDQKFVQITIDNLVLRGTSLVNTKWIYGLVINTGNRTKLMKNASTKSRQKWSRLEFVYGNHVIVLIICQVFISLIVAIAGVLWMRRKGYTLWYLNLDQTSDSLKTFFITIGSMVLLFGSFIPVDLLLIWEVVRLLQGYLINWDNDMYSEKTGRHALSKAGQLLEEMGNVTHIYSDKTGTLTQNVMQLQNIGLGNKGTYGFYDFSNIKENITKSRHWGSQDPMDPVLEEYENEENVYSNVNDDNKNDHGTNESDDNNNNNNNNDDDDHHDNNHNIHNDQNNNAQYDNYDNYYLNNHQQQNKVKNRPCIDDETNFYRNNNMNKERTRKSYTFLNPLNWSNTSINTKMKKKKSLFYNKNSLANYESLLNNTYTEDDFIRGENEFVFFNRILFVNKIYSIRHDVQDQIYFLLLVLSLCHSAMIRNVDIDEMDNNEDDNNNNEKLKIYDKETDIVYTYITQTQPQYDASSPDELALISTSLYLGCEFVNRPNLTTIEIELTSTFAQRFILGEKKFEKFLEKKEFYEKEFDTYFPDISACLGKEKKKDNNKINEMINNKGNTKDDYMNNFHMSIPIKNIFGSNKMQYKEEIKYEEKIIKKVVPILSFEILDVFAFDNVRKRMSLIVKNEKKEIFMLVKGADTSVLKLASKNQENIVDHVEHQLHAFATSGLRTLVLGYKYLTENEFSDMYRNHINARKKSETDKEEYLQEFYEEAENNLIIIGCTGIDDKLQDDVPQVIQDLRDAGMTICVLTGDKLETAINIGHSINILNKQTYNAIFTETDPTLLLEQLNIHEKNTNAANLLNVDHGTKWWNSVNWEHLNLDLRSETILNFMKSNFHGSLKKSIISSNMFNMKNNNSFPSLARQDKVFNSFLESSESFCHNNNEMDKTKGKEKVHYSQFSITITGEALDVIMKDKILKIKFYTLARSASTLIACRVTPKQKSLLVKENSAFNPRGTSLAIGDGANDVGMILMANVGVGIAGKEGLQAARSSDFTISEFKYLKKLLFVHGRESLRRNSFLVYFCIFRNVSFCLCSMILIFWTGYSAIDAWNPWTKQIINIAFTSLPVIFFVALDKQLPHNILLNNPLLYETSPSTLWPFYSNRKMEFYTNKVKGCYKSFYKFCFFPIRYIPYIQRYTEKIKSWIGKRSKPEKYRTYGTHYLFVYLLFAIWLATVETVIMLHFSTGQAYSSSLKDNHHVDIDFNTFSQILYTHHVIAVNIVVVLMTNTWFFISHVVLWIELIATFFFWFIISNTKFFLDIIGADELHGTFEKAHSSGNYYASLIISLYISILPLIILMTYQFIKKPTMEQIVLEQLKLGKFEGLRKHEIKKLAYIDNQKSSNEFTHKGFAFAVEAKEAFWGLVQKAIYKIKMPLVKDETANIKHKRKS

SEQ ID NO: 22588 - protein, 3127 aa, Plasmodium falciparum 3D7
MKTQTLSLMNINGKRKFLGTNNKIYRKVIINPTSEDDIQKFCRNYFRIYNFSLYNFIRRLISFDAILVYSLFLTVYIFSEINHGETKKYLFIDTAISLFFNIILLIVIESLFELKKLKDVKNANSQYYLRIVPKMSYFEKVMTKDIKVGNIIRIFQGDEFPADVVILYVKNNANAIVDSFKIDGLFRKSIKYAVDKYKIDKDYLKMLSEINGVIRCELPNKNIFCFQGNFKLDKHPRSLLLNYENFALQSSVLKGAEYIDAVVVYTGADTKKNLNIPQKIEENKTFCIKMNNIVYYLIFMYFVFVVLSIVIKTIFFHKKNSFQNSRDSFLSMLEDFVGLYILVLPIMMYSEKSLIYIIQSLRIENDLRMRNTDSEKPKVFNKNKNDSLGNVDLLATSRNGVLVKRKELLVSCVINNVMYGKKDIICSRTNFKLPTLNILDSERKNVSNLLNLDERIFKDPENIFFPTRDFYSFLKLFENKISSIYNPYSSSLSNLLKEKYKNYVNEEILNKNVKLTSFVKSQLTIGYNQICEDDELSYNCYEIKEDSQKENIQSVKIEDFILGLCGCNRIIIYNEKSLDISMNEYKSDNFMETYSKFETENEEYHENDHDEYHNMEHSDDENINSIEYEDICLYNIIRNTGFSIYCYKNTLFLYNLMKECKVYFLTCYHDFLRSNKFSMCILKCGYSINNEKEGGILYVRGYDFNILPYISKEKNNIKKIKNVIKIYTLNYLKVIILCKKQISNEDIAKYIILKSISKKLSFKFYDLIKLFFLYDLEVIGIIGLKNQLREGVKETFNDVINFDIKSWIFANECSKDTYLTALQCNLIVSSSNLFLINYYNLKNTHEEGANILFHNFISSLYKLKSNSYAVVINDESIKNIMTNVESMKIFLCIAMRATVVLFCKLQNETKGKIIRTLYALTSPKLTVLGIGTTLNDAYLLKYSSISVFLSLNEHVNILYNISDYVLQEFKFISELLILGRLNRFSLCKVFLWIIYLKITVVSFYFFHNFDNYFSGSSASSILYTQTTFALLHYFLIIAFSAYEIDLPYKFVRRLPYIYQLSRRKYFLNNNIILLTIIEAILISLTSYYILRLNVFHLITHREFTFHIFILNVFITTEKILLLSKTWHIYFFIMAVLIIGILLIYVNIFTLVDCIKNGKCEFSLFQMENIYFWTSLFPILYINFIFDKLMKYIKNRIYPDISDYLRKYFLRRICCHNNDKFLSQRKIKGINKFVNFEKNDILLKYIPTPKIYKIKDDPTYYNKSKRSKFLYDTFRKVIDINVKYRNQQLNLEYKTYEKGNKLKLRIIVILLFLIYIIIFSSQTIIDINTKSNIHYITMFYIIYFVLACVLLIYIRIRNKATSTFFFFLSRFLLICGFCIELYDNISNDILNVLITYSFTVSYIFFMSFKILEALLVCISILLLTFGVYYEKNKNMIDICTHFCSNPYLSINNLDHMNISCLCKKQIVIFLISLLSFTLICLSMKYYEIFYLKKKFLFRYKQKVNLAKQIEILHTMLPNFLVEYLLISDPKNDGIMVGKNISGEDRGIISVIFCDIDDFQNMVSTLQPHVLVETLDNLYLYFDKCIKYFNCIKIETVFESYLAASGLSEKKNNALDKIMYDTKCAIKLAIAQLSAKYYISYKVLDTREHFSDNSTSYDKYINKNISLKIGIHTGKAISGVIGSVKPQYALFGDTVNTASRMKSTSLPDHIHVSYDTYKYLKEDNTFIWKERKVFIKGKGKMKTYLLVDILDDVKRKGESLNYYSSSNLLLSQLGSEAVSIYEEREDIKEGSMDIIKESSRDIIKEDSRDIIKEISTNISKSSSRNISKSSSRSISDIKEGQIIDKEDLIFKINRMKNKIDSRYSKRIDKESRDKISDKTNHVLDEVVKHSDIHLLNYEINNKRCKKMKGDTNNENKLIGDIFNMYDKKIKYIYKKNYKSKSMENISFIKHYRNTKYKKSDYLLLDNKGESKKFKRNTSYVLESPLHLIGDIVDNNIKRKKKKKEIKTIVSDDMFTSPVNIKEYNYNEQERKKEIVGNLSYDKTKKIFPFIKFTKEGRIKKKKIEKKEKKEKKENNNNFLYNDDYSSYSSPKYGDNENNFVIKYIRERKDFQKKFDHPNFNFSKFLHNYNPMKNKNKNKKNNKNVRRNEYPNYTSSSKDGVSYNFLSDSLFSSDNEYSSDNEYSSDSEKYYKKRFKKNKKIIKFDDLFTKIYIKKKRLLQMNNYDVKGKGKKLKNKGMERNKTKYKNVNEITKMKYFVNNENRDHEVNKEDISKSMQKYFLHISKHKKEQIEDKKKTHKYFHKNVECVYPYAGNNINHNFSRNEKRKYSINLYDHLDEQEKIKGKKKYFNKDKELIGSINKQTERKPKKKNKKNIENKKDKKKIRMITNKTKEKHSNSIISVEEQNMNHNNSLKKKEVNFTGKNEEYLNRANTNCSLGIKEMEEDVYEFHSNNIYYNNQTSYSDDINNTTKLKGMGNNTNDISKNKGKNKLGKKISFFSMNNKYHESEIMNEEDNKNMLNLTQSQIINKDKYNYFTHCPSLKKKKSVFTKINNLFKNYFKSIDVHEKFGFSKKFKFHSKDSDDIKGNNNKISKNRYNNNNNNNNSNYSNIDSGKYSHNNKKNHHHNNNKYHHHNNNKYHHHNNNKYHHQNNNYEKHHHSNNSRVMLSKGEKTEKNENVDYAYQFDNYDKKLLKKLTSNLQLNKKNVKNFNMFYYKFNDEELEEEYTRNYYREIINIDLTKKLIIIFIFTEIFLSLCNIIELSFYEKKLRYNDSIVIIWLIRSIYLFIITYIWIILKTKLKEYKNNSSKMMWTIFILNIFLCSWGIILIDLSCIHYSMLLGNKNERALFFMKDASELIICIQLIFIKNMLFKHKFFFFVFFYIFLIYSFSKLFSIHTCQTHICCSIILFISINILYFWYSEYLDRIQFLVKRKRNRMEKISQDFLTKILPRQVLEEYQNDNLQLTYKHEKIAFLFADIVGFTKWSKTVSPKEVLKLLQKLISKIDKDTIKLGLYKLFTIGDAYVATSQPNSSITDESEALEGILNILKLAKLILHNINTIKIQFNKHDFNMRIGLHYGSCVGGIIGSVRIRYDMWGLDVLIANKIESNGIPGEIICSEQFRHFFIQNEPQA

SEQ ID NO: 22589 - protein, 1213 aa, Arabidopsis thaliana
MVRSGSFSVDSSATHQRTPSRTVTLGHIQPQAPTYRTVYCNDRESNQPVRFKGNSISTTKYNVFTFLPKGLFEQFRRIANIYFLGISCLSMTPISPVSPITNVAPLSMVLLVSLIKEAFEDWKRFQNDMSINNSTVEILQDQQWVSIPWRKLQVGDIVKIKKDGFFPADILFMSSTNSDGICYVETANLDGETNLKIRKALERTWDYLVPEKAYEFKGEIQCEQPNNSLYTFTGNLVVQKQTLPLSPDQLLLRGCSLRNTEYIVGAVVFTGHETKVMMNAMNAPSKRSTLEKKLDKLIITIFCVLVTMCLIGAIGCSIVTDREDKYLGLHNSDWEYRNGLMIGFFTFFTLVTLFSSIIPISLYVSIEMIKFIQSTQFINRDLNMYHAETNTPASARTSNLNEELGQVEYIFSDKTGTLTRNLMEFFKCSIGGVSYGCGVTEIEKGIAQRHGLKVQEEQRSTGAIREKGFNFDDPRLMRGAWRNEPNPDLCKELFRCLAICHTVLPEGDESPEKIVYQAASPDEAALVTAAKNFGFFFYRRTPTMVYVRESHVEKMGKIQDVAYEILNVLEFNSTRKRQSVVCRFPDGRLVLYCKGADNVIFERLANGMDDVRKVTREHLEHFGSSGLRTLCLAYKDLNPETYDSWNEKFIQAKSALRDREKKLDEVAELIEKDLILIGSTAIEDKLQEGVPTCIETLSRAGIKIWVLTGDKMETAINIAYACNLINNEMKQFVISSETDAIREAEERGDQVEIARVIKEEVKRELKKSLEEAQHSLHTVAGPKLSLVIDGKCLMYALDPSLRVMLLSLSLNCTSVVCCRVSPLQKAQVTSLVRKGAQKITLSIGDGANDVSMIQAAHVGIGISGMEGMQAVMASDFAIAQFRFLTDLLLVHGRWSYLRICKVVMYFFYKNLTFTLTQFWFTFRTGFSGQRFYDDWFQSLFNVVFTALPVIVLGLFEKDVSASLSKRYPELYREGIRNSFFKWRVVAVWATSAVYQSLVCYLFVTTSSFGAVNSSGKVFGLWDVSTMVFTCLVIAVNVRILLMSNSITRWHYITVGGSILAWLVFAFVYCGIMTPHDRNENVYFVIYVLMSTFYFYFTLLLVPIVSLLGDFIFQGVERWFFPYDYQIVQEIHRHESDASKADQLEVENELTPQEARSYAISQLPRELSKHTGFAFDSPGYESFFASQLGIYAPQKAWDVARRASMRSRPKVPKK

SEQ ID NO: 22590 - protein, 1123 aa, Arabidopsis thaliana
MVRSGSFSVDSSATHQRTPSRTVTLGHIQPQAPTYRTVYCNDRESNQPVRFKGNSISTTKYNVFTFLPKGLFEQFRRIANIYFLGISCLSMTPISPVSPITNVAPLSMVLLVSLIKEAFEDWKRFQNDMSINNSTVEILQDQQWVSIPWRKLQVGDIVKIKKDGFFPADILFMSSTNSDGICYVETANLDGETNLKIRKALERTWDYLVPEKAYEFKGEIQCEQPNNSLYTFTGNLVVQKQTLPLSPDQLLLRGCSLRNTEYIVGAVVFTGHETKVMMNAMNAPSKRSTLEKKLDKLIITIFCVLVTMCLIGAIGCSIVTDREDKYLGLHNSDWEYRNGLMIGFFTFFTLVTLFSSIIPISLYVSIEMIKFIQSTQFINRDLNMYHAETNTPASARTSNLNEELGQVEYIFSDKTGTLTRNLMEFFKCSIGGVSYGCGVTEIEKGIAQRHGLKVQEEQRSTGAIREKGFNFDDPRLMRGAWRNEPNPDLCKELFRCLAICHTVLPEGDESPEKIVYQAASPDEAALVTAAKNFGFFFYRRTPTMVYVRESHVEKMGKIQDVAYEILNVLEFNSTRKRQSVVCRFPDGRLVLYCKGADNVIFERLANGMDDVRKVTREHLEHFGSSGLRTLCLAYKDLNPETYDSWNEKFIQAKSALRDREKKLDEVAELIEKDLILIGSTAIEDKLQEGVPTCIETLSRAGIKIWVLTGDKMETAINIAYACNLINNEMKQFVISSETDAIREAEERGDQVEIARVIKEEVKRELKKSLEEAQHSLHTVAGPKLSLVIDGKCLMYALDPSLRVMLLSLSLNCTSVVCCRVSPLQKAQVTSLVRKGAQKITLSIGDGANDVSMIQAAHVGIGISGMEGMQAVMASDFAIAQFRFLTDLLLVHGRWSYLRICKVVMYFFYKNLTFTLTQFWFTFRTGFSGQRFYDDWFQSLFNVVFTALPVIVLGLFEKDVSASLSKRYPELYREGIRNSFFKWRVVAVWATSAVYQSLVCYLFVTTSSFGAVNSSGKVFGLWDVSTMVFTCLVIAVNVRILLMSNSITRWHYITVGGSILAWLVFAFVYCGIMTPHDRNENVYFVIYVLMSTFYFYFTLLLVPIVSLLGDFIFQGYGGEMVLPV

SEQ ID NO: 22591 - protein, 1174 aa, Arabidopsis thaliana
MAGERRKGMKFSKLYSFKCFKPFSREDHSQIGSRGYSRVVFCNDPDNPEALQLNYRGNYVSTTKYTAANFIPKSLFEQFRRVANIYFLVVAFVSFSPLAPYTAPSVLAPLLIVIGATMVKEGVEDLRRRKQDVEANNRKVEVLGKTGTFVETKWKNLRVGDLVKVHKDEYFPADLLLLSSSYEDGICYVETMNLDGETNLKLKHALEITSDEESIKNFRGMIKCEDPNEHLYSFVGTLYFEGKQYPLSPQQILLRDSKLKNTDYVYGVVVFTGHDTKVMQNATDPPSKRSKIEKKMDQIIYILFSILIVIAFTGSVFFGIATRRDMSDNGKLRRWYLRPDHTTVFYDPRRAVAAAFFHFLTALMLYGYLIPISLYVSIEVVKVLQSIFINQDQEMYHEETDRPARARTSNLNEELGQVDTILSDKTGTLTCNSMEFVKCSIAGTAYGRGMTEVEVALRKQKGLMTQEEVGDNESLSIKEQKAVKGFNFWDERIVDGQWINQPNAELIQKFFRVLAICHTAIPDVNSDTGEITYEAESPDEAAFVIASRELGFEFFSRSQTSISLHEIDHMTVYELLHVLEFSSSRKRMSVIVRNPENRLLLLSKGADSVMFKRLAKHGRQNERETKEHIKKYAEAGLRTLVITYREIDEDEYIVWEEEFLNAKTLVTEDRDALIDAAADKIEKDLILLGSTAVEDKLQKGVPDCIEKLSQAGVKIWVLTGDKTETAINIGYACSLLREGMKQILVTLDSSDIEALEKQGDKEAVAKLREGMSQTAAVTDNSAKENSEMFGLVIDGKSLTYALDSKLEKEFLELAIRCNSVICCRSSPKQKALVTRLVKNGTGRTTLAIGDGANDVGMLQEADIGVGISGAEGMQAVMASDFAIAQFRFLERLLLVHGHWCYRRITLMICYFFYKNLAFGFTLFWYEAYASFSGKPAYNDWYMSCYNVFFTSLPVIALGVFDQDVSARLCLKYPLLYQEGVQNVLFSWERILGWMLNGVISSMIIFFLTINTMATQAFRKDGQVVDYSVLGVTMYSSVVWTVNCQMAISINYFTWIQHCFIWGSIGVWYLFLVIYGSLPPTFSTTAFQVFVETSAPSPIYWLVLFLVVFSALLPYFTYRAFQIKFRPMYHDIIVEQRRTERTETAPNAVLGELPVQVEFTLHHLRANLSRRDSWN

SEQ ID NO: 22592 - protein, 1189 aa, Arabidopsis thaliana
MAGERRKGMKFSKLYSFKCFKPFSREDHSQIGSRGYSRVVFCNDPDNPEALQLNYRGNYVSTTKYTAANFIPKSLFEQFRRVANIYFLVVAFVSFSPLAPYTAPSVLAPLLIVIGATMVKEGVEDLRRRKQDVEANNRKVEVLGKTGTFVETKWKNLRVGDLVKVHKDEYFPADLLLLSSSYEDGICYVETMNLDGETNLKLKHALEITSDEESIKNFRGMIKCEDPNEHLYSFVGTLYFEGKQYPLSPQQILLRDSKLKNTDYVYGVVVFTGHDTKVMQNATDPPSKRSKIEKKMDQIIYILFSILIVIAFTGSVFFGIATRRDMSDNGKLRRWYLRPDHTTVFYDPRRAVAAAFFHFLTALMLYGYLIPISLYVSIEVVKVLQSIFINQDQEMYHEETDRPARARTSNLNEELGQVDTILSDKTGTLTCNSMEFVKCSIAGTAYGRGMTEVEVALRKQKGLMTQEEVGDNESLSIKEQKAVKGFNFWDERIVDGQWINQPNAELIQKFFRVLAICHTAIPDVNSDTGEITYEAESPDEAAFVIASRELGFEFFSRSQTSISLHEIDHMTGEKVDRVYELLHVLEFSSSRKRMSVIVRNPENRLLLLSKGADSVMFKRLAKHGRQNERETKEHIKKYAEAGLRTLVITYREIDEDEYIVWEEEFLNAKTLVTEDRDALIDAAADKIEKDLILLGSTAVEDKLQKGVPDCIEKLSQAGVKIWVLTGDKTETAINIGYACSLLREGMKQILVTLDSSDIEALEKQGDKEAVAKASFQSIKKQLREGMSQTAAVTDNSAKENSEMFGLVIDGKSLTYALDSKLEKEFLELAIRCNSVICCRSSPKQKALVTRLVKNGTGRTTLAIGDGANDVGMLQEADIGVGISGAEGMQAVMASDFAIAQFRFLERLLLVHGHWCYRRITLMICYFFYKNLAFGFTLFWYEAYASFSGKPAYNDWYMSCYNVFFTSLPVIALGVFDQDVSARLCLKYPLLYQEGVQNVLFSWERILGWMLNGVISSMIIFFLTINTMATQAFRKDGQVVDYSVLGVTMYSSVVWTVNCQMAISINYFTWIQHCFIWGSIGVWYLFLVIYGSLPPTFSTTAFQVFVETSAPSPIYWLVLFLVVFSALLPYFTYRAFQIKFRPMYHDIIVEQRRTERTETAPNAVLGELPVQVEFTLHHLRANLSRRDSWN

SEQ ID NO: 22593 - protein, 1200 aa, Arabidopsis thaliana
MVGGGTKRRRRRLQLSKLYTLTCAQACFKQDHSQIGGPGFSRVVYCNEPDSPEADSRNYSDNYVRTTKYTLATFLPKSLFEQFRRVANFYFLVTGVLAFTPLAPYTASSAIVPLLFVIGATMVKEGVEDWRRQKQDNEVNNRKVKVHRGDGSFDAKEWKTLSIGDIVKVEKNEFFPADLVLLSSSYEDAICYVETMNLDGETNLKVKQGLEVTSSLRDEFNFKGFEAFVKCEDPNANLYSFVGTMELKGAKYPLSPQQLLLRDSKLRNTDFIFGAVIFTGHDTKVIQNSTDPPSKRSMIEKKMDKIIYLMFFMVITMAFIGSVIFGVTTRDDLKDGVMKRWYLRPDSSSIFFDPKRAPVAAIYHFLTAVMLYSYFIPISLYVSIEIVKVLQSIFINQDIHMYYEEADKPARARTSNLNEELGQVDTILSDKTGTLTCNSMEFIKCSVAGTAYGRGVTEVEMAMGRRKGGPLVFQSDENDIDMEYSKEAITEESTVKGFNFRDERIMNGNWVTETHADVIQKFFRLLAVCHTVIPEVDEDTEKISYEAESPDEAAFVIAARELGFEFFNRTQTTISVRELDLVSGKRVERLYKVLNVLEFNSTRKRMSVIVQEEDGKLLLLCKGADNVMFERLSKNGREFEEETRDHVNEYADAGLRTLILAYRELDEKEYKVFNERISEAKSSVSADRESLIEEVTEKIEKDLILLGATAVEDKLQNGVPDCIDKLAQAGIKIWVLTGDKMETAINIGFACSLLRQDMKQIIINLETPEIQSLEKTGEKDVIAKASKENVLSQIINGKTQLKYSGGNAFALIIDGKSLAYALDDDIKHIFLELAVSCASVICCRSSPKQKALVTRLVKSGNGKTTLAIGDGANDVGMLQEADIGVGISGVEGMQAVMSSDIAIAQFRYLERLLLVHGHWCYRRISTMICYFFYKNITFGFTLFLYETYTTFSSTPAYNDWFLSLYNVFFSSLPVIALGVFDQDVSARYCLKFPLLYQEGVQNVLFSWRRILGWMFNGFYSAVIIFFLCKSSLQSQAFNHDGKTPGREILGGTMYTCIVWVVNLQMALAISYFTLIQHIVIWSSIVVWYFFITVYGELPSRISTGAYKVFVEALAPSLSYWLITLFVVVATLMPYFIYSALQMSFFPMYHGMIQWLRYEGQCNDPEYCDIVRQRSIRPTTVGFTARLEAKKRSVRISEPAS

SEQ ID NO: 22594 - protein, 1202 aa, Arabidopsis thaliana
MAGPSRRRRRLHLSKIYSYTCGKSSFQEDHSNIGGPGFSRVVYCNEPGSPAAERRNYAGNYVRSTKYTVASFFPKSLFEQFRRVANFYFLVTGILSLTDLSPYGAVSALLPLALVISATMVKEGIEDWRRKQQDIEVNNRKVKVHDGNGIFRQEEWRNLRVGDIVRVEKDEFFPADLLLLSSSYEDSVCYVETMNLDGETNLKVKQGLEATSSLLNQDSDFKDFRGVVRCEDPNVNLYVFVGTLALEEERFPLSIQQILLRDSKLRNTEYVYGAVVFTGHDTKVIQNSTDPPSKRSRIERTMDKIIYLMFGLVFLMSFVGSIIFGVETREDKVKNGRTERWYLKPDDADIFFDPERAPMAAIYHFFTATMLYSYFIPISLYVSIEIVKVLQSIFINRDIHMYYEETDKPAQARTSNLNEELGMVDTILSDKTGTLTCNSMEFIKCSIAGKAYGRGITEVERAMAVRSGGSPLVNEDLDVVVDQSGPKVKGFNFEDERVMNGNWVRQPEAAVLQKFFRLLAVCHTAIPETDEESGNVSYEAESPDEAAFVVAAREFGFEFFNRTQNGISFRELDLVSGEKVERVYRLLNVLEFNSTRKRMSVIVRDDDGKLLLLSKGADNVMFERLAKNGRQFEAKTQEHVNQYADAGLRTLVLAYREVDENEYIEFNKSFNEAKASVSEDREALIDEITDKMERDLILLGATAVEDKLQNGVPECIDKLAQAGIKIWVLTGDKMETAINIGFASSLLRQEMKQIIINLETPQIKSLEKSGGKDEIELASRESVVMQLQEGKALLAASGASSEAFALIIDGKSLTYALEDEIKKMFLDLATSCASVICCRSSPKQKALVTRLVKSGTGKTTLAIGDGANDVGMLQEADIGVGISGVEGMQAVMSSDIAIAQFRYLERLLLVHGHWCYSRIASMICYFFYKNITFGVTVFLYEAYTSFSGQPAYNDWFLSLFNVFFSSLPVIALGVFDQDVSARFCYKFPLLYQEGVQNILFSWKRIIGWMFNGFISALAIFFLCKESLKHQLFDPDGKTAGREILGGTMYTCVVWVVNLQMALSISYFTWVQHIVIWGSIAFWYIFLMIYGAMTPSFSTDAYMVFLEALAPAPSYWLTTLFVMIFALIPYFVYKSVQMRFFPKYHQMIQWIRYEGHSNDPEFVEMVRQRSIRPTTVGYTARRAASVRRSARFHDQIYKDLVGV

SEQ ID NO: 22595 - protein, 1203 aa, Arabidopsis thaliana
MTKCRRRRLHLSNIYAFKGRKSNFQEDHSHIGGPGFSRVVYCNEPNSPAAERRNYVGNYVRSTKYTLASFIPKSLFEQFRRVANFYFLVTGVLSLTALSPYSPISALLPLTFVIAASMVKEAIEDWGRKKQDIEMNNRKVKVHDGNGIFRREGWRDLKVGNIVRVEKDEFFPADLLLLSSSYEDSICYVETMNLDGETNLKVKQGLEATSSALHEDSDFKELKAVVKCEDPNADLYTFVGTLHFEEQRLPLSITQLLLRDSKLRNTEYIYGVVVFTGHDTKVIQNSTDPPSKRSRIERKMDKIIYLMFGVVFLMSFIGSIVFGIETREDRVRNGGRTERWYLRPDNADIFFDPDRAPMAAVYHFFTAVMLYSYFIPISLYVSIEIVKVLQSLFINNDILMYYEENDKPAHARTSNLNEELGMVDTILSDKTGTLTCNSMEFIKCSIAGTAYGRGITEVERSMAMRSNGSSLVGDDLDVVVDQSGPKIKGFNFLDERVMKGNWVKQRDAAVLQKFFRLLAVCHTAIPETDEATGSVSYEAESPDEAAFVVAAREFGFEFFSRTQNGISFRELDLASGKTVERVYRLLNVLEFNSARKRMSVIVRDEDGRLLLLSKGADNVMFERLAKNGRKFEEKTREHVNEYADAGLRTLILAYREVDENEYIEFSKNFNEAKNSVTADRESLIDEITEQMERDLILLGATAVEDKLQNGVPDCIDKLAQAGIKIWVLTGDKMETAINIGFACSLLRQEMKQIIINLETPHIKALEKAGEKDAIEHASRESVVNQMEEGKALLTASSSASSHEAFALIIDGKSLTYALEDDFKKKFLDLATGCASVICCRSSPKQKALVTRLVKSGTGKTTLAIGDGANDVGMLQEADIGVGISGVEGMQAVMSSDIAIAQFRYLERLLLVHGHWCYSRISSMICYFFYKNITFGVTVFLYEAYTSFSAQPAYNDWFLSLFNVFFSSLPVIALGVFDQDVSARYCYKFPLLYQEGVQNLLFSWKRIIGWMFNGVFTALAIFFLCKESLKHQLYNPNGKTAGREILGGTMYTCVVWVVNLQMALAISYFTWLQHIVIWGSVAFWYIFLMIYGAITPSFSTDAYKVFIEALAPAPSYWLTTLFVMFFALIPFFVFKSVQMRFFPGYHQMIQWIRYEGHSNDPEFVEMVRQRSIRPTTVGFTARRAASVRRSGRFHDQLNKNFIAF

SEQ ID NO: 22596 - protein, 789 aa, Glycine max
  unsure (1)..(789): unsure at all Xaa locations
PRVRSYFMIEDRDMYDASSGSRFQCRSLNINEDLGQIRYVFSDKTGTLTENKMEFQRASVHGKNYGSSLPMVDNTAAEDVIPKRKWKLKSEIAVDSELMTLLQKDSNREEKIAANEFFLTLAACNTVIPILSDDGFSNTRRIDYQGESPDEQALVSAASAYGYTLFERTSGHIVIDVNGEKLRLDVLGLHEFDSVRKRMSVVIRFPDNAVKVLVKGADTSMFSILENGSESNIWHATESHLNEYSSQGLRTLVVGSRDLSDAELEEWQSKYEDASTSLTDRAAKLRQTAALIECNLKLLGATGIEDKLQEGVPEAIESLRQAGIKVWVLTGDKQETAISIGLSCKLLSADMQQIIINGTSEVECRNLLADAKTKYGVKSSSREQQNLKEEETTAPLALIIDGNSLVYILEKELQSELFDLATSCRVVLCCRVAPLQKAGIVDLIKSRTDDMTLAIGDGANDVSMIQMADVGVGICGQEGRQAVMASDFAMGQFQFLKKLLLVHGHWNYQRVGYLVLYNFYRNAVFVMMLFWYILCTAFSTTSALTDWSSVFYSVIYTSIPTIIVGIQDKDLSHRTLLQYPKLYGSGHRQEAYNMQLFWITMMDTVWQSLVLFYIPLFTYKDSSIDIWSMGSLWTIAVVILVNVHLAMDINRWVLITHVAIWGSIIITYGSMVVLDSIPVFPNYWTIYHLARSPTYWITILLIIIVALLPRFTCKVVYQIFWPSDIQIAREAKLXEKMARXFAAKATSFQLTCVTVPRLIETTEISNEMASLVFVRHNAFLWQLVVQVTK

SEQ ID NO: 22597 - protein, 665 aa, Glycine max
  unsure (1)..(665): unsure at all Xaa locations
XQSIFVLRERFFALGQVVQREYKILNLLDFTSKRKRMSVIVRDEEGNIILFCKGADSIIFDRLSKNGKMCLEATTRHLNEYGEAGLRTLALAYRKLDDQEYSDWNNEFQKAKTAVGSEREAMLEQVSDIMERELILVGATAVEDKLQKGVPQCIDKLAQAGLKIWVLTGDKMETAINIGFACSLLRQGMKQICITMNSDSVTNDGKEVIKGNILNQITNASQMIKLEKDPHAAFALIIDGKTLTYALEDDVKHQFLGLAVGCASVICCRVSPKQKALVTRLVKEGTGKTTLAIGDGANDVGMIQEADIGVGISGVEGMQAVMASDFAIAQFRFLERLLVVHGHWCYKRIAQMICYFFYKNIAFGLTIFYFEAFAGFSGQSVYDDWYMILFNVFLTSLPVISLGVFEQDVPSEVCLQFPALYQQGPKNLFFDWYRILGWMGNGLYSSLVIFFLVITIFYDQAFRANGQVADMAAVGTTMFTCIIWAVNCQIALTMSHFTWIQHLFVWGSITTWYVFLLLYGMLPPQYSKSAYQLLVEVLAPAPIYWAATLLVTIACVLPYLAHISFQRCFNPMDHHIIQEIKYYKKDIEDQHMWTRERSKARHETKIGFTARVEAKIRQFKGKLQKKQQSSLGAFSPSXPLQNNLLVFSPFRVCIFLFIFWGSSLI

SEQ ID NO: 22598 - protein, 470 aa, Glycine max
  unsure (1)..(470): unsure at all Xaa locations
XTELYASETRKLVESFINYVIYKLSRSGLQNVEGKRIHDFFLTLATCNTIVPLVVECXDTPDPDVKLIDYQGESPDEQALAYSAAAYGFMLIERTSGHIVIDIHGQRQKFNVLGMHEFDSDRKRMSVILGYPDNSVKVFVKGADTSMLNVIDRSFKMVVRATEAHLHSYSSMGLRTLVIGMRDLNASEFEQWHASFEAASTAVFGRAAMLHKVSSIVGNNLCILGATAIEDKLQQGVPESIESLRTAGIKVWVLTGDKQQTAISIGYSSKLLTSNMNLITINTNNRESCRKSLQDANAGGSSHAVSTPLALIIDGTSLVHILDSELEEQLFQLASRCSVVLCCRVAPLQKAGIVALVKNRTADMTLAIGDGANDXVSMIQMAHVGVGISGQEGRQAVMASDFAMGQFRLLVPLLLIHGHWNYQRLGYMILYNFYRNAVLVLVLFWYVAFDCMXSLMLQELDCSGYCCLES

SEQ ID NO: 22599 - protein, 550 aa, Glycine max
  unsure (1)..(550): unsure at all Xaa locations
XFGSSKTTVTEDRDVLVDAAADKMERDLILLGATAVEDRLQKGVPECIEKLARAKIKLWVLTGDKMETAVNIGYACSLLRQDMKQIVITLDSPDILSLEKQGDKEALSKASLESIKKQIREGISQTAKESSNTNKGSSSGFGLIIDGKSLDYSLNKNLERSFFELAINCASVICCRSSPKQKARVTKLVKLGTGKTTLSIGDGANDVGMLQEADIGVGISGAEGMQAVMASDFAIAQFRFLERLLLVHGHWCYRRISMMICYFFYKNIAFGFTLFWFEAYASFSGQAAYNDWYMSFYNVFFTSLPVIALGVFDQDVSAKLCLKYPYLYLEGVEDILFSWPRILGWMLNGVLSSLVIFFLTTNSVLNQAFRRDGKVVDFEILGVTMYTCVVWTVNCQMALSINYFTWIQHFFIWGSIAFWYVFVLVYGYLSPAISTTAYRVFVEACAPSGLYWLVTLLVVVCVLLPYFSYRSFQSRFLPMYHDIIQRKQVEGHEVGLSDXXELPKQVQGKLLHLRERLKQRELXNVNASKHPFLELEIVFSFLLSWEVALK

SEQ ID NO: 22600 - protein, 468 aa, Glycine max
  unsure (1)..(468): unsure at all Xaa locations
XLRFLGRVXRKGALNAGNNLCILGATAIEDKLQQGVPESIESLRTAGIKVWVLTGDKQQTAISIGYSSKLLTSNMNLITINTNNRESCRRRLQDANSEGRSDAVSTPLALIIDGTSLVYILDSELEEELFQLANRCSVVLCCRVAPLQKAGIVALVKNRTDDMTLAIGDGANDVSMIQMAHVGVGISGQEGRQAVMASDFAIGQFRLLVPLLLIHGHWNYQRLGYMIIYNFYRNAIFVLVLFWYVLFTAFTLTTAINEWSSTLYSIIYSSLPTIIVGILDKDLGKRTLLKYPQLYGAGQRHEAYNKKLFLLTMLDTLWQSMVIFWAPLFAYWSSTIDVASIGDLWTLGVVILVNLHLAMDVIRWYWVTHVVIWGSIVATFISVMIIDSIPNLPGYWAFFDAAGTGLFWLLLLGIIVTALLPHLVVKFVYQYYFPNDIQICREAEKIGYDRVVESGQVEMLPISDNPSR

SEQ ID NO: 22601 - protein, 536 aa, Glycine max
  unsure (1)..(536): unsure at all Xaa locations
XFGSSKTTVTEDRDVLVDAAADKMERDLILLGATAVEDRLQKGVPECIEKLARAKIKLWVLTGDKMETAVNIGYACSLLRQDMKQIVITLDSPDILSLEKQGDKEALSKASLESIKKQIREGISQTAKESSNTNKGSSSGFGLIIDGKSLDYSLNKNLERSFFELAINCASVICCRSSPKQKARVTKLVKLGTGKTTLSIGDGANDVGMLQEADIGVGISGAEGMQAVMASDFAIAQFRFLERLLLVHGHWCYRRISMMICYFFYKNIAFGFTLFWFEAYASFSGQAAYNDWYMSFYNVFFTSLPVIALGVFDQDVSAKLCYYIXXERLKQRGCENVNASKHPFLXKLEIVFSFLLSWEVALXVVVRIANSXDGKVVDFEILGVTMYTCVVWTVNCQMALSINYFTWIQHFFIWGSIAFWYVFVLVYGYLSPAISTTAYRVFVEACAPSGLYWLVTLLVVVCVLLPYFSYRSFQSRFLPMYHDIIQRKQVEGHEVGLSDXXELPKQVQGKLLHLRERLKQRELXNVNASKHPFLET

SEQ ID NO: 22602 - protein, 512 aa, Glycine max
  unsure (1)..(512): unsure at all Xaa locations
VPQCIDNLAQAGLKIWVLTGDKMETAINIGFACSLLRQGMKQICITTPVTDSVATDVKQAIKDNILNQITNGSQMIKLEKDPHAAFALIIDGKTLTYALEDDMKLLFLGLAVDCASVICCRVSPKQKALVTRLVKQGSGKTTLAIGDGANDVGMIQEADIGVGISGVEGMQAVMASDFAIAQFRFLERLLVVHGHWCYKRIAQMICYFFYKNITFGLTIFYFEAFTGFSGQSVYDDWYMILFNVVLTSLPVISLGVFEQDVPSEVCLQFPALYQQGPKNLFFDWYRILGWMGNGLYASLIIFFLIVTIFYDQAFRADGQVADMAAVGTTMFTCIIWTVNCQIALTMSHFTWIQHLFVWGSIATWYIFLSLYGMLSXPEYSSRVPAKLLVESXVGPAPIHWVTTLLVAVTCNLPYFAHISFQRCFNPMDHHIIQEIKYYKKDIEDQHMWTXRERSKARQETKIGFTARVEAKIRQLKGRLQKKQSTLAISAPXRDTIHKLTVLGIFRVAYYIV

SEQ ID NO: 22603 - protein, 532 aa, Glycine max
  unsure (1)..(532): unsure at all Xaa locations
EEVSDKIERNLILLGATAVEDKLQNGVPDCIDKLAQAKIKIWVLTGDKMETAINIGFSCRLLRQGMKQIIIHLEIPDIQALEKVGDKMAIAKASRESVHHQISEAAQLLSASRGTCQTSALITAAKDDRXGGKSLTYALEDNMKNMFLELTSHCASVICCRSSPKQKALVTRLVKSGTGKTTLAIGDGANDVGMLQEADVGIGISGVEGMQAVMSSDIAIAQFRYLERLLLVHGHRCYRRMSSMICYFFYKNITFGFTLFLYEVYASFSGQPAYNDWFLSLYSVFFSSLPVIALGVLDQDVSAMYCLKFPILYQEGVQNVLFSWRLILSWMLNGFISATMIFFFCTKAIVPQAFDEEGRTAGRDMLAVTMYTCVVWVVNLQMALAIRYFTLIKHIFIWGSIAYWYLFLMVYGAMPPNISTNVYKVFIETLAPSPSFWIVTFFVAISTLIPYVSCSVIQMWFFPMYHQMVQWIRYERKTNGPEXXYSDVMRQKSLRPTEFNSTFXQLRLTIVDRITNHRXYMYNCILTCKRVY

SEQ ID NO: 22604 - protein, 486 aa, Glycine max
  unsure (1)..(486): unsure at all Xaa locations
MKQFVISSETDAIREVEDRGDQVEIARVIIEQVKRELKKCLEEAQSSFQSLSGPKLALVIDGXCLMYALDPSLRVMLLNLSLNCHAVVCCRVSPLQKAQVTSMVKKGAQKITLSIGDGANDVSMIHVSHVGVGISGMEGMQAVMASDFAIAQFRYLADLLLVHGRWSYLRICKVVIYFFYKNLTFTLTQFWFTFQTGFSGQRFYDDWFQSLYNVIFTALPVIIVGLFDKDVSSSLSKKYPQLYMEGIRNVFFKWKVVAIWAFFSVYQSLIFFYFVSSTNLSAKNSAGKIFGLWDVSTMAFTCVVITVNLRLLMICNSITRWHYISVGGSILAWFLFIFIYSGISTPYDRQENIYFVIYVLMSTFYFYVMLFLVPVAALFCDFVYQGVQRWFFPYDYQIIQEMHRDEVDSSRAQLLEIGNQLTPDEARSYAISQLPRELSKHTGFAFDSPGYESFFAAQLGVYAPPKAWDVARRASMRSRSKTGQQK

SEQ ID NO: 22605 - protein, 425 aa, Glycine max
  unsure (1)..(425): unsure at all Xaa locations
PRVRSYFMIEDRDMYDASSGSRFQCRSLNINEDLGQIRYVFSDKTGTLTENKMEFQRASVHGKNYGSSLPMVDNTAAEDVIPKRKWKLKSEIAVDSELMTLLQKDSNREEKIAANEFFLTLAACNTVIPILSDDGFSNTRRIDYQGESPDEQALVSAASAYGYTLFERTSGHIVIDVNGEKLRLDVLGLHEFDSVRKRMSVVIRFPHNAVNGSSSSRIASSGSSLENGSESNIWHATESHLNEYSSQGLRTLVVASRDLSDAELEEWQSKYEEASTSLTDRATKLRQTAALIESNLKLLGATGIEDKLQEGVPEAIEALRQAGIKVWVLTGDKQETAISIGLSCKLLSGDMQQITINGTSEVECRNLLADAKAXIWRETIKWRASESEDKTNEGTNAPLALIIDGNSLVYILEXELESELFDLHF

SEQ ID NO: 22606 - protein, 421 aa, Glycine max
  unsure (1)..(421): unsure at all Xaa locations
XGXCLMYALDPSLRVMLLNLSLNCHAVVCCRVSPLQKAQVTSMVKKGAQKITLSIGDGANDVSMIHVSHVGVLRSGMEGMQAVMASDFAIAQFRYLADLLLVHGRWSYLRICKVVIYFFYKNLTFTLTQFWFTFQTGFSGQRFYDDWFQSLYNVIFTALPVIIVGLFDKDVSSSLSKKYPQLYMEGIRNVFFKWKVVAIWAFFSVYQSLIFFYFVSSTNLSAKNSAGKVFGLWDVSTMAFTCVVITVNLRLLMICNSITRWHYISVGGSILAWFLFIFIYSGISTPYDRQENIYFVIYVLMSTFYFYVMLFLVPIAALFCDFVYQGVQRWFFPYDYQIIQEMHRDEVDSSRAQLLEIGNQLTPDEARSHAISQLEISKXAFDSPGYESFFAAQXAGRRASMRSRSKIGQQKISGVGSLYIA

SEQ ID NO: 22607 - protein, 463 aa, Glycine max
  unsure (1)..(463): unsure at all Xaa locations
MTFKFHLILDLALVTPQSSQLRRVIKGNILSQITNASQMIKLEKDPHAAFALIIDGKTLTYALEDDVKHQFLGLAVGCASVICCRVSPKQKALXTRLVKEGTGKTTLAIGDGANDVGMIQEADIGVGISGVEXXVMAXDFAIAQFRFLERLLVVHGHWCYKRIAQMICYFFYKNIAFGLTILYFEAFAGFSGQSVYDDWYMILFNVFLTSLPVISLGVFEQDVPSEVCLQFPALYQQGPKNLFFDWYRILGWMGNGLYSSLVIFFLVIIIFXDQAFCVNGQIADMAAVGTMMFTCIIWAVXCQIALTMSHFTWIQHLVVWGSITTWYIFLLLYGMLPPQYSKSAYQLLIEVLAPAPIYWTATLLVTIACVLPYLAHISFQRCFNPMDHHIIQEIKYYKKXXEDQHMWTRERSKARQVTKIGFTARVEAKIRHFKGKLQXKQQSSLGALSPSXXLQNNFSFQSF

SEQ ID NO: 22608 - protein, 365 aa, Glycine max
  unsure (1)..(365): unsure at all Xaa locations
XDKLVLRLEXEIQALEKDGDKMAIAKASMQSVHLQISEGAAQLTAYRGSSHQAFALIIDGKSLVYALEDNMKNLFLELAIRCASVICCRSSPKQKALVARLVKSGAGKTTLAIGDGANDVGMLQEADIGVGISGVEGMQXYLERLLLVHGHWCYRRISSMICYFFYKNITFGFTLFLYEVYASFSGQPAYNDWFLSLYNVFFSSLPVIALGVFDQDVSARYCLKFPLLHQERVQNVLFSWHRILSWMLNGFISALIIFFFCTKAMELQAFDVEGRTAGKDILGAAMYTCVVWVVNLQMALAVSYFTMIQHFFIWGSILLWYLFLVVYGAMPPHFSTNAYKVLIEALAPSPSYWIVTLFVVIFTLI

SEQ ID NO: 22609 - protein, 582 aa, Glycine max
  unsure (1)..(582): unsure at all Xaa locations
ADAGLMTLIFAYRELDEEEYNLFNEEFMVPNTLESTDREQIWNTITGXRTERLVLLGVTVADGIEQSQLPECIXMVANLRISIWFLSDFNMWMPLNIRLSXSLVRPXMKXIISGGSSXYPQVHLSCVGGXLPNGIIYQLVNXQLTYGKELHAXTDENSEALVLIIDGKSLTYALEDDVKDLFLTLAAGCASVVCCRSSPKQKALVTRWVKVKTGSTTLALGDGANDVGMLQEADIGIGISGVERIQADMSSDIGSSQCLFLDRLLQKSXNIQSFXSSQMISYFFYKKIAFGFTLFFYEIYAAFSGRAAFHGWHRSLFFVVFASLPAAAWRVSVQDASASLRLVGPLFYQEGVQNVLFSWKRILGWAFNGVLSATIIFFFCINGMENQAFRKAGEVADLEVLGATMYTCVVWVVNSQMALSISYFTYIQHLFIWGGILFWYIFLLVYGTMDPSLSTTAYKVLIEACAPAPSYWLITLLVLVASLLPYFAYASIQMRFFPTFHQMIQWIRNDGQTTDPEYVNIVRQRSIRHTTVGFTARFEASHSSGASKSIQVXKQCXQLSNVFSVSLLYLKFFGLNIGENLV

SEQ ID NO: 22610 - protein, 285 aa, Glycine max
  unsure (1)..(285): unsure at all Xaa locations
SIYLIPISLYVSIEIVKVLQSVFINQDVHMYYEETDKPAHARTSNMNEELGQVDTILSDKTGTLTCNSMEFIKCSIAGVAYGQRVTEVERALSGRHESHXXGQVLEKISESKSSIKGFNFMDERVMNGNWIKEPNANVIQNFLQLLAVCHTAIPEVDEETGKVSYEAESPDEAAFVIAARELGFEFYERTHTTISLHELDPISGQKINRSYKLLNILEFTRARKRMSVIVRDAEGKLLLLSKGADSVMFERIAKNGRDFEEKXKQHISEYADSGLRTLILAYREX

SEQ ID NO: 22611 - protein, 209 aa, Glycine max
  unsure (1)..(209): unsure at all Xaa locations
XLGIRLEELMKXMKILYXIDYQGESPDEQALVSAASAYGYTRFERTSGHIGIDVNGEKLRLDVLGLHEFDSVRKRMAGGIRVPDNAVKGLVKGADTSMVSILENGRDNNIWHATRSHLNEYSSQGLRTLVVASTDLSGAELEEWQSRYEEASTSLTDRATKLRQTAALIESNLKLLGATGIEDKLQEGVPEAFEALLQAGIKVWVLTGD

SEQ ID NO: 22612 - protein, 210 aa, Glycine max
  unsure (1)..(210): unsure at all Xaa locations
TLYFCDLYCNGAQRHITIQXISLLTIEHQGIRCXDFDGSFMILXAIKASVIHQLTNGKELLAESDENSEALALIIDGKSLTYALEDDVKDLFLTLAAGCASVVCCRSSPKQKALVTRWVKAKTGSTTLAIGDGANDVGMLQEADIGIGISGVEGMQAGMSSDIALAQFHFLERLLLVHGHWCYRTLSSVISYFFYKNIGFGFTLFFYEIX

SEQ ID NO: 22613 - protein, 181 aa, Glycine max
  unsure (1)..(181): unsure at all Xaa locations
XIMIIRKXKLHXGGGVFDYSKWRDLKVGDVVRVEKDEFFPADLILLASNYDDAICYVETMNLDGETNLKLKQALEATSKLHEDSNFQNFRAVIKCEDPNANLYTFVGSMELEDQQYPLAPQQLLLRDSKLRNTDFVYGVVIFTGHDTKVMQNATDPPSKRSXIEKRMDKIIYCLFFDLFNX

SEQ ID NO: 22614 - protein, 237 aa, Glycine max
  unsure (1)..(237): unsure at all Xaa locations
XLVNSASSAEDILFXYLSKAGLTSAESAREHISEYACSGLRTLLLADRELNEEEYKKFSKDPRVRKNLVSEDQEQIVEGIIQNIEKDLILLGATAVEDKLQDGVPECIDKLAQAGIKLWVLTGDKMETAINIGFACSLLRQGMKQIIISSDTPETKSLEKMEDKSAAEAAIKSSVLRQLRESKALLSTADENYEALALIIDGKSLTYALEDDVKDLFLELAIGCASVICCRSSPKQX

SEQ ID NO: 22615 - protein, 372 aa, Glycine max
  unsure (1)..(372): unsure at all Xaa locations
XFGSSLKSCDYRTLAIGDGGNDVRMIQQADIGVGISGREGLQAARAADYSIGKFRFLKRLILVHGRYSYNRTAFLSQYSFYKSLLICFIQILFSFISGVSGTSLFNSVSLMAYNVFYTSVPVLVSVLDKDLSEKTVMQHPQILFYCQAGRLLNPSTFAGWFGRSLFHAIVVFVISIHAYAYDKSEMEEVSMVALSGCIWIQAFVVTMETNSFTILQYMAIWGNLAAFYVINWIFSALPSSGMYTIMFRLCRQPSYWIAIFLMVAAGMGPILAIKYFRYTYRPSKINALQQAERLGGPILSLGTIEPQLRSVEKDVSTLSITQPKTRNPVYEPLLSDSPNATRRSFGAGTPFDFFQSQSRLSLSSYTRNCKDN

SEQ ID NO: 22616 - protein, 235 aa, Glycine max
  unsure (1)..(235): unsure at all Xaa locations
XKAEEIELETVVTSKGDEDQKXXAIKGFGFEDDRLMNCNWLQEPNADDLLMFFRILAVCHTAIPELNEETGVYTYEAESPDEGAFLVAAREFGFEFCRRTQSSIFIHERFSASRKVVEREYKLLNLLDFTSKRKRMSVIVRDEEGSLFLFCKGADSIIFDRLSKNGKHYLEATTRHLNEYGEAGLRTLALAYRKLDEQEYTAWNNEFQKAKAAVGADRDSMLERVSDMMEKGLIL

SEQ ID NO: 22617 - protein, 340 aa, Glycine max
  unsure (1)..(340): unsure at all Xaa locations
TISPSKRSTIEKKMDYIIYTLFTVLILISFISSIGFVFKTKYQTPKWWYLRPGNIEYQFDPGKLGLAGMSHLITALILYGYLIPISLYVSIEFVKVLQATFINQDIQMYDDESGTPAEARTSNLNEELGQVDXTILSDKTGTLTCNQMDFLKCSIAGTAYGVRSSEVELAAAKQMASDLEEQELNLSNFPMRKXRVTCHGKISQKXXEETELGTAVTSKDDGARRPAIKGFGFEDDRLMNGNWLKEPNADVLLLFFRILAVCHTAIPELNEETESCTYEAESPDEGAVLVAAREFGFEFYRRTQSSVAICERFSASGHEVHREYKILNLLDFTSIRXRMX

SEQ ID NO: 22618 - protein, 278 aa, Glycine max
  unsure (1)..(278): unsure at all Xaa locations
MKRYVYIDDDESSHDIYCDNRISNRKYTVLNFLPKNLWDEVSRVMNQYFLLIACLQLWPLITPVNPVSTWGPLIFIFAVSASKEAWDDYNRYLSDKKANEKEVWVVKKGIKKHIQAQDVHVGNIVWLRENDEVPCDLVLIGTSDPQGVCYIETAALDGETDLKTRVIPSACMGIDVDLLHKIKGVIECPYPDKDIRRFDANXMRLVPPFIENEICPLTIKNTILQSWYLRNTEWACGVAVYTGNETKMGXCVRGIPEPKLTAMDAMIDKLXTGAIFIX

SEQ ID NO: 22619 - protein, 196 aa, Glycine max
  unsure (1)..(196): unsure at all Xaa locations
TVRMARRIVXAREFVSKGVLHRVRKNLVSEDQEQIVEGIIQNIEKDLILLGATAVEDKLQDGVPECIDKLAQAGIKLWVLTGDKMETAINIGFACSLLRQGMKQIIISSDTPETKSLEKMEDKSAAEAAIKSSVLRQLRESKALLSTADENYEALALIIDGKSLTYALEDDVKDLFLELAIGCASVICCRSSPKQX

SEQ ID NO: 22620 - protein, 204 aa, Glycine max
  unsure (1)..(204): unsure at all Xaa locations
XAGILAFTKLTPYTAVSAILPLSIVIGATMVKEGIEDWRRKKRDTEVNNRRVIVLKADGTFEYTAWKNLRVGNIVKVEKDEFFPADLLLLSSSYEDAVCYVETMNLDGETNLKLKQGLEVTSSLQEDLNFLKFKATVKCEDPNANLYSFVGSMEFEEKNYALFHQQLILRDFKLCNTYYIFGAVIFTVHDTYGNQNYTDPPXKX

SEQ ID NO: 22621 - protein, 307 aa, Glycine max
  unsure (1)..(307): unsure at all Xaa locations
XFGSSFTLTQFWFTFQTGFSGQRFYDDWFRSLYNVICTALPVIIVGLFDKDVSSSLSKKYPELYMEGIRNVFFKWKVVAIWAFFSVYQSLIFFYFVSTTNLSAKNSAGKVFGLWDVSTMAFTCVVITVNLRLLMICNSITRWHYISVGGSILAWFIFIFIYSGISTPYDRQENIYFVIYVLMSTFYFYVMLLLVPIAALFCDFVYQGVQRWFFPYDYQIIQEMHRDEVDSSRAQLLEIGNQLTPAEARSHAISQLPREISKHTGFAFDSPGYESFFAAQLGVYAPPKAWDVARRASMRSRSKTGQQK

SEQ ID NO: 22622 - protein, 247 aa, Glycine max
  unsure (1)..(247): unsure at all Xaa locations
XIPISLYVSIELVKVLQSIFINHDQEMYYEETDRPARARTSNLNEELGQVDTILSDKTGTLTCNSMEFVKCSIGGIPYGRGMTEVEKALARRGKDVESEVDGGSSDLLGQSNDFVDSRHPIKGFNFRDERIMNGQWVNEPYTDFIQRFFRVLAICHTAIPDVDKESREISYEAESPDEAAFVIAARELXGFEFFARTQTSISLHELNYESGKKVDXRVYQLLHVFRSQQFPQRMSVIVRNEENQLLX

SEQ ID NO: 22623 - protein, 169 aa, Glycine max
  unsure (1)..(169): unsure at all Xaa locations
XQGIYFSXRKSFTDIEVNNRRVKLHEGDGIFKYTEXKNLRVGNIVKIMKDEFFPADLLLISSSYEDAVCYVETMNLDGETNLKIKQGLDVTSSLQEDFKFHDFRAVIKCEDPNANLYSFVGSMDFGEXXYPLSAQQLLLRDSKLRNTDYVFGAVIFTGHDTKVIQNSTD

SEQ ID NO: 22624 - protein, 156 aa, Glycine max
  unsure (1)..(156): unsure at all Xaa locations
ADAGLRTLILAYRELDEEEYNLFNEEFMEAKNLVSADRDQIGEEISEKIEKDLILLGVTAVEDKLQNGVPECIDKLAQAGIKLWVLTGDKMETAINIGFACSLLRQGMKQIIISSDTTETKSLEKMEDKSAAAVAIKASVIHQLAKGKELLAESDX

SEQ ID NO: 22625 - protein, 220 aa, Glycine max
  unsure (1)..(220): unsure at all Xaa locations
VLQSIFINQDIHMYYEETDKPALARTSNLNEELGQVDTILSDKTGTLTMNSMEFIKCSVAGVAYGRGVTEVEQAMGKSNGLPIFHEHINGLESKLNEIRDSPDRKEPIKGFNFTDERIMNGNWVNEPYADVIQNFFRLLAICHTAIPEVDEETGNVSYEAESPDEAAFVIAAREVGFKFYKRTQTCLSIYELXDPASGNEVERSAMLLCVLIFNTVVFFS

SEQ ID NO: 22626 - protein, 163 aa, Glycine max
QEYFIQFHRVAYVYFLAMAALNQLPPLAVFGRTVSLFPLLFVLCVTAIKDAYEDWRRHRSDRNENNRECLVLQSAQFCPKKWKNIQAGDVIKISADEMIPADMVLLGTSDPSGIAYIQTMNLDGESNLKTRYAKQETASAVSDACAVSGVIRCEPFCRLLAAV

SEQ ID NO: 22627 - protein, 150 aa, Glycine max
  unsure (1)..(150): unsure at all Xaa locations
LDSRLTHAXELIENDLILIGSTAIEDKLQEGVPACIETLQRAGIKIWVLTGDKIETAINIAYACNLINNEMKQFVISSETDEIREVEDRGDQVXIARFIKEEVKRELKKCLEEAQSSFHPYLGPXLAPVVDGKCLMYALDPSLRVMLLNX

SEQ ID NO: 22628 - protein, 187 aa, Glycine max
  unsure (1)..(187): unsure at all Xaa locations
XYKNIAFGFTLFFFEMYASFSGQAAYNDWFMSLYNVFFTSLPVIALGVFDQDVSSKLCLKFPLLYQEGTQNILFSWKRIIGWALNGVVTSAIVFFFCIRSMEYQAFRKGGEVMGLEVLGATMYTCVVWVVNCQMALSISYFTYIQHIFIWGSILFWDIFLLAYGAIDPSFSTTVYKVFIEALAPAPX

SEQ ID NO: 22629 - protein, 1160 aa, Oryza sativa (japonica cultivar-group)
MRPASASAADERPLVELTSAAATAPASTETSTFSSAPGFTRAVRCSGAGSSSSSSSSSDEGGGGVYPGNAISTTKYTAASFVPKSLFEQFRRAANCFFLVVACVSFSPLAPYRAVSVLLPLVVVVGAAMAKEAVEDWRRKQQDIEVNSRKVEVYDGTQSFHQTEWKKLQVGDIVKVKKDEFFPADLVLLSSSYEDGICYVETMNLDGETNLKRKQSLDVTAGLNEDHSFHTFKAFIQCEDPNEKLYSFLGTLHYNGQQYPLSPQQILLRDSKLRNTNQIYGIVIFTGHDTKVMQNAMEPPSKRSSVERRMDKIIYLLFVILFAIASFGSVMFGIRTRAELSAGNYAWYLRPDNSTMYFDPNRATLAAICHFLTSLMLYVCLVPISLYISIEIVKVLQSTFINQDQNMYCEESDKPARARTSNLNEELGQVHTILSDKTGTLTCNSMEFLKCSIAGVAYGNRPIEVQMPYGGIEEECVDIGQKGAVKSVRPVKGFNFTDDRLMNGQWSKECHQDVIEMFFRVLAVCHTAIPVADRTSGGMSYEAESPDEGALVAAARELGFEFYHRSQTSISVHEYDPVFGRKVDRTYKLLNTLEFSSARKRMSVIVSTEEGRLFLFCKGADSVILERLSKDNSKACLTNTKCHIDEYSEAGLRTLALAYRELTEDEYVAWNMEYSAAKNSVHNDHDVAVEKASENIEKDLVLLGATAVEDRLQKGVPECIHKLAQAGIKIWILTGDKLETAVNIGYACNLLRKGMEEVYITLDNPGTNVPEEHNGESSGMAPYEQIGRKLEDARRQILQKGTSAPFALIIDGNALTHALMGGLKTAFLDLAVDCASVLCCRISPKQKALITRLVKNRIRKTTLAIGDGANDVGMLQEADIGVGISGAEGMQAVMASDFAIAQFRFLERLLLVHGHWCYRRIAAMICYFFFKNITFGFTLFWFEAHAMFSAQPGYNDWFISFYNVAFTSLPVIALGVFDKDVSSRVCLEVPSLHQDGVNNLFFSWSRILSWMLNGVCCSIIIYFGALHAVLIQAVRQDGHVAGFDILGVTMYTCVVWTVNCQLALYISYFTWIQHFVIWGSILIWYTFLVIYGSFPPTISTSAYHVFWEACASSPLYWLSTLVIVVTALIPYFLYKITQSLFCPQHCDQVQRPNSKELVAQ

SEQ ID NO: 22630 - protein, 1175 aa, Oryza sativa (japonica cultivar-group)
MASGRPLLDASPRPTQQPPASSLLPPPQPEPPLRADRLAFSLEVPDPFRREPDPSSAASQRGEEEGGGEEESRAVVVGEPSSSEAAAGFAGNGVRTAKYSVLTFLPRNLFEQFRRLSYVYFLAITVLNQLPQVAVFGRGASVLPLAFVLFVTAVKDAYEDLRRHRSDRQENNRLARVLLAPPAAGEFAPKKWKHIRVGDVVRVASSETLPADMVLLATSDPSGVAHVQTVNLDGETNLKTRYAKQETQLRFSQDGGIGGVLHCERPNRNIYGFQANLEIDGKRVSLGPSNIVLRGCELKNTTWAIGVVVYAGKETKVMLNSSGAPSKRSRLETQLNRETVILSIMLIGMCTTASVLAGIWILNHRGDLEFTQFFREKDYTTGKNYNYYGMGMQIFITFLMAVIVYQVIIPISLYISMELVRLGQAYFMGADRDLYDESSRSKFQCRALNINEDLGQIKYVFSDKTGTLTENKMEFQCASIRGVDYCSGKDSCGYSVVVDDLLWTPKMAVKIDHRLLKLLRGGGTDEETKLVLEFFLALAACNTIVPLVLDTRDSKQKLIDYQGESPDEQALVYAAASYGIVLVERTSGYVVIDVLGDRQRFDILGLHEFDSDRKRMSVIVGCPDKTVKLYVKGADSSLFGITKNSLDLDIVRATEAHLHKYSSFGLRTLVIGMRELSQPEFEEWQLAYENASTSVLGRGNLLRSVAANIENNIRILGATGIEDKLQDGVPETIESLRQADIKVWILTGDKQETAISIGYSCKLLTNDMTQIVINNNSKESCKRSLEEAHATIKKLRIASTGTQSPELASESAGVTLALIVDGNSLVYILETELQEELFKVARECSVVLCCRVAPLQKAGIVALIKNRTDDMTLAIGDGANDVSMIQMADVGVGISGQEGRQAVMASDFAMGQFRFLVPLLLVHGHWNYQRMSYMILYNFYKNATFVLVLFWYVLYTAFTLTTAITEWSSLLYTVLYTSLPTIVVGILDKDLSKETLLAYPKLYGSGQRDEKYNVNLFVLNMLEALWQSLVVFYMPYFAYRQSTIDMSSLGDLWALAPVIVVNMLLAMDIFRWNWIVHAFVWGTIAATTICLFVIDSIWFLPGYGAIFHIMGTGLFWLLLLIIVVAAMVPHFVIKAFTEYFTPSDIQVAREIEKFENVNQVNRSEVPMTRLHDPRR

SEQ ID NO: 22631 - protein, 1185 aa, Oryza sativa (japonica cultivar-group); identical to SEQ ID NO: 622

SEQ ID NO: 22632 - protein, 1158 aa, Dictyostelium discoideum
MLKERKKSTDNGKESNNSSTNCYTLFLNDSKQTHSQTGKKFPKNFIRTTKYTILSFIPKNLFEQFRRLSNFYFLCVLIIQLVPQISPLLPLTSILPLSFVLIITATKEALEDYNRYQSDKKNNLEPYTIVRDAKLETISSQDICVGDIIRIQNGQQIPADLVLISTSHDEGLCYVETSNLDGETNLKVRKALGDTNKLSTAEDISLLRGSIVYETPNERLYRFNGRIVIQGKENIIHSLNHTMFLQRGSQLRNTKFIFGVCVYAGVDTKLFLNQQPPPSKFSTVEKLLNKLILFVFIFQLIVCLLCAVASAFYQEIVVEDMLYLGPTVSLSIYGVRNFFTYFILFNTMIPISLWVTLEMVKVGQAKFMEFDSYMRSQVLTIDPATGEEKEVEKGCKAKTSNLNEDLGRIQHIFSDKTGTLTENIMRFCKCSIGSDIYDERESSGSLVRALDASRDSSSNPKILINGTNNTKFQTIQSFLRILSLCHTVISEVDEATGNITYQSQSPDELALVHTASNNGFVFLDRRTDEILLRENGVDTSYGLLAILEFSSARRRMSVIVRTPEGTIKLLTKGADMSISCRLLNDKERNAARDETLNFLKNFSRDGYRTLMVAERDLTVEEYEDWKQQFFQASTSIENREEKIEAVCELIEKDLSLVGTTAIEDKLQNQVPETISYLLNAGLHIWVLTGDKQETAVNIGYSCRLFDPAMELIFVNTESSEECGLILDRYIALLPPENENEDVKDTQTYGQQQMQQGMNGATPGIMNMISNSLQSGSGNKTPIIDIIIPTLAVEYGLVIDGHTLTFALNDHKEKFLRLGRACKSVICCRTTPLQKALVVRVVKQSEKKISLAIGDGANDVSMIQEAHVGIGIFGKEGTQAARASDYCIHQFSHLKRLLCVHGRYSYIRVSGLIQYSFYKNMSFTLCLLWFSFSSLFTGQTIFDSWIITFYNILFTSLPPFFYGLFEKDIDEESIMENPNLYKSIQQSQILSKKSFFVWNLLGLWHSLVTFFGVKLLFVNDVMSSNGHVAGIWTLGTLVSTASILTVNVRMAIETKLWNYISLVGMIISLAAYFIMLVLYAFFLPLNSNMYDIFSSQLETGSYYFTIIVIIIVAIFPDFCIKYYSRMYAPKDTQLEKERKGLKGVKEYQREMKEFNNQRA

SEQ ID NO: 22633 - protein, 1829 aa, Dictyostelium discoideum
MSNYNGDYHYNNEQQQQNHHQQYRLTTDNSAILNGGVSYDLLDSTNSARSNNPLLQGMGYEEDTFEEQQQQEIYSNNDNSGNNNSNNNNGASDKSYFTIYGNINNDAHNQTLTQHTDLEHVDLESDSKNIKYQQQQQQHQHQQHQQYQQQHQQHQQQNNNNNNNGYINPHLTESSQLFSSVPLNSLPNSPYHINYPYTNNNSNSNNSYNNTNSNNNNNGNDVYSENNNSNNNNNNSNNKKKYKKKSKRNIFKKKQDKESDLNKSNTPIIIKDNDDDDDNNNNNNEDNNDDNQRNSKVFIHKQHQSQVPDQYLAILKASHSAVQRKKRDAIALRVGRQWLTHIITVQTVGNLIRALPIFVLEKYYVMLLIFFQALFLVIGSYGVKRLKPYLILLYVIGCFSTTILDLIMTFTYAHTQSSRPFTEELLAFWSYVLFVSLLCILNIIGGILLGLKLFVSVVSLQDPSDNSLILLTASLVGSFDIERDESASSSSSQAKASRCIFFYGSDVKKAIATTTSITKKLTTGEKIKQYFKLKKLFPKSPFSSGHNNNNYNNNDNNIINNNNNNNGLNNNHNNNNNEQITSSVATSTDKSQLLSMKTNQVITSKYNVFTFIPKVIFYQFSRLANLYTLAIVILCMFSFSPVGPVSSLTPLLVVIAVTSFKELAEDLKRHKQDKEINGRETSIYRPPFYIISPTASKEDLKRRQSGFNGFISRIGNFFGSIKQQYIQTEKNIPMVPDNDYSKVGVFQSCHWEDIKVGDIIYVKNGESLPADIICLSSSRSDGRAYLETANLDGETNLKAKSSISKCQWIKGAKDLDDFSCKVDYEGPNNDIYSFDGVLTILKGFERSNIGDSTVVPTTNYVPVSIDQLLLRGTKLRNTDWVIGVVTYSGVDTKIEKNASKASQKRSSVERGVNNKLLILFLLQTIICIICSIGHNRWHLEDDKDAKPWYIDYDPEQTEDFIYVSYVILYNTLIPLSMYVSMEMIRVSNAHFIDSDLEMYDESTDTPAQARNTNINEELGQIQYLFSDKTGTLTCNEMVFNRCTIGGQVYGPEDSSLQDLRLFIKNQLSDSSNGSYLRQSNGLSGGGSGSGGSGGSGGDASSSLNPLGIPVQPEISIPILSDQTEYIKEFLTCLAICNTVLIEKNKEIDDLMMNHDNSKSHHNFNGGTNSGCSVIPKYQAASPDEESLTLTAARYGFILKSREDNIITISVHGREERFELLNVLEFNSYRKRMSVIVKNQKNQIKIYCKGADSVIFERAKKNTDHCVGILQSTEKHLSEFACSGLRTLCMSVRTIEHEEYIAWNKIHQEASISLVKKAEKVDAACELIEKDLLLIGSTGIEDRLQDHVPETISALREAGIKVWVLTGDKQETAISISTSSAVINEEMELIILNESNKQALMKRLLTISNEKRLHHFNDMSGRWGSVKYLSKLLEKVASKLRLEPSDAPNLLNKSNGMSAPAVNASQKHIAIIIDGSTLALALEPDLRYFFLQVAKTCESVVCCRCSPSQKAKVVNLVAERSFLFGDGAITMSIGDGANDVPMIQKAHVGVGISGREGMQAVLASDFAIANFSMLRRLILVHGNRSYKRMTKLILYSFSKNIALSISQFWFGFFSGFSGQMIYFDFLFTLYNALFTSLPVIFLGTFDQDTKEDDLLNKPYLYRVCQSNSPFSTWKFIWWVFIGMWQSATIFFVTFFVMNTSTIEGGKTLGLWSIGTAAYIYLVVTVNLQISFITRYWTRQTILAVSISVVSTFLFVMLYSVLGRYVEADATHIIFELYALPTFWLLLIIAPSIALLPYIIVSLNSWLFNTDNLSLQKLNLEKKGFIMMNDL

SEQ ID NO: 22634 - protein, 1161 aa, Dictyostelium discoideum
MNLGKLKIRRKKARPSYPIIEIRPNKTTENDVNKSKGYKSNDISTTKYTRYNFIFKNLFEQFKRITNIYFAAICVITLIPQVSPLSPVTSLLPLIFVLVVTALKEAFEDYRRYKADKASNYTQYQVYRDGSFRLIKSKHICVGDFIRIDNDQAFPSDILVLSSNLEDGICYVETSQLDGETNLKLFKAAKETNSLTQEQLLDLNANIECELPNNNLYKFKGKFTLQNDNSTFSLSEKQLMLRGARLRNTHFIIGIVLYCGKDTKLSLNQKNPPSKFSTIETRLGRSVIGIFCFKVVLVIIATVLSSLFEFNTARDSWYLRSDFDSLGFTIVKNFVSYFAILSFLIPMSLMVTLEVVKVSQAKYMEWDVKMSYKENKKYEKQIEQPQEELKIKNEDKTTTTTISPNGDIELSNIVAKKEKSKILNKYMSVKNSNLNDELALIKYIFSDKTGTLTENRMLFSKCSINGTCFDGAMNQQLLDEVTSKTKNEESIREFLLNMSLCHAAVSDVNEETGKITYQSQSPDEIALCDCAKINQFEFINRTSTHAQIRVMGEDKQYQLLAIMEFSSDRRRMSILLREEDENNDNNSTETTPIDDSSTTDIDGNLLTPPPQLTNLKKKGKIILYSKGADSIMMERLSEKESNSELLEQTKEHISQFSREGLRTLILAKREISQEEYSNWSQQYHEASTLIHDREAEMERLNDQIERGFELVGCTAIEDKLQDGVPETIDYLLKANIKVWIITGDKQETAINIGYSCKLLVPEIPIIIINAESTEECGTQIKRAIENFIDPETQVDKKVSMVINGESLTFVLKDHSADFLKIAAKCHSVVACRVTPLQKALIVRLVKKSTKEVCLSIGDGANDVSMIQEAHIGVGIFGNEGTQAARASDYALLRFRHLARLITVHGRYSMVRNSLCIKYSFYKNMAFFLCQFWFSIYSGWTAMTLYDSWIVTTFNILMTSVPPYFMALFEKDVNEKIIPKNPHLFKEVQDCHLFQYRSILNWLIGALYHSVVFFFGLYFFLDGSGDMVNQWGRIGGKELAGSFCATFAVLSILLKAAIEIKHWNFIVHIGIWGSVIVYLVISLVDSSIITQIPNMYWVFIYALHLLKFYVMVIIMIFIALVPDFTLKFVRRHLSPTNSNIEQEKYILNRGKNKNNIDNDEEI

SEQ ID NO: 22635 - protein, 2084 aa, Dictyostelium discoideum
MFQNKEQTESILVWEKIVSIFSIPSQNEILNFKQKSPNNIDNNLKQLFNFVKLYKLESLVLDWYFESIKKYFKSTLSNEFWKFFNNVNLAELDSSTTSGRQLKFINHQFALSINLLHKVFSFFKSNLFLFYELLFKKESYNFNFLIKKLQDLLITNIMLTTNQQTKYFNTILFMFFERDFISFTKSFYHSKKQILKDEEENNNNSKDLEFNDQQQEEEEEEEENEEESKSYIIMEMSFEDSITDINIKEDSFMDLCKKLQDLNFIVISEEIFTQILFKKVFEYIETRCKGVFEKSFLKSILEWADQVIFKWLAMILLSSTTTTKINNYNDIINNNDDDNDDDDDDENKENSLKIFNQWKKRLEFSIYENYSQQRISELFDMIVQYPDSLPSLEDLSICFQKIPIEKTMITNLKRVLHNRLLHPGANTSDIITQYISTIHAMDIIDPSGMVMEKVGKPIREYLSQREDTIRCIISSFTEESNEIYQELCNYDPQDNGGDDDSNNSLLAFGNCDLYVDEGDNFSSIDDFKFWIPNKIDGSSTTISIGNAKANNNNKKKKKKDTISHLVNIYDGIDLFINEYRSMLSDRLLSVVDFDLDKEIKNIELLKLRFGDSVLFNCEIMIKDMVDSKRLNLQIKNSQGVNNNNNNNNNNNNELKEFETLILSQLFWPTLKGDEFKYPKSIEKKMQIYSKEYERIKTPRQLIWKQHLGLVDLDLEIGNNIQSFQVSPIHATLIMLFESDDGDDDDEKELTLEYLSKQLEISKDLVKKKLIFWLNNQIIKETSHETYKINNKEKEEQKQRQQQIENDDQDESSSDDDDDDNNIVVEEEEEEKSTSAKEKEEQMRVVESFIIGMLINFKTLPLERIHSMLTMFNSELYTSTIHELKAFLSKLIYFVIVSVITLIPEVSPLDPSTTILPLGLIVGLTAIKEAYEDFKRYRADKSSNYKEYLIYQLPKPIPQQQQPPLSSSTTPLPQKQQQENYDIESSKFKLIKSKNIKVGDIIKIDNNQSIPADIILLSSSSLGDGVCFVETSELDGESNLKIFKSCNETHSKFKNISLNLNESQQEQQQQFIKLKGNIQCEFPNNNLYKFKGILNLENDNENNNNDNIEENLKTTTTTEITTISLSEKQLLLRGSTLRNTEFIYGIVVYCGRDTKLSLNQKSPPSKYSTVEKMISKSVIGIFIFKMILVIISTIVGTLVTERTTNKSWYLWINEEPDSIGLVIVKTFFAYFAYLSFLVPMSLLITLEIVKVSQGGFMQFDLLMSYKEKQYRKQLLQYEQNQNNQNQNQNQNNGDLELQQQQQQQKQFTKSISSTSISKSISKDNLKSEILKDDDSSGSGRENKIVHKYMTVKNSNLNDELALVKYIFSDKTGTLTENKMIFKKCSIGGKIYQSPNESQLLNEIKNKSSSMELEEIVSEGGETIDQKFVKEFLINMTTCHSAVSELDQDGIAIYQSPSPDEISLLNCSKLNQFIFKERNNGEIKIQILKKEKTFKLLTSMDFTSERRRMSVVLKDIETNKIYLYSKGADSVMMSRLKQDNNINNNNNNINNNGLINYNNQLIIEKTTQHIKEFSNEGLRTLILAMKEIEIDQFNQWFEKYNSILNSIENREEQIEELNNQLENDLTLIGCTAIEDKLQDGVPETIEFLLNSNIKVWIITGDKQETAINIGYSCKLLSHSNQLFIINSNSRDNCEQQLNNIINNLNEIENNNNNNLNNSNNNNNNLNNNNNNYSLVIDGESLIFIFLEFENKFLSIAKKCHSVICCRVTPIQKSLIVKMVKKDTKEVCLSIGDGANDVSMIQEANIGIGIFGNEGSQASRASDYSLLRFRHLSRLITIHGRYSMIRNAACIRYSFYKNMTFFFIQFLFSIHSGWSSQTLFDDAIITSFNTVITAIPPYFMALFEKDVNERVLEKNPHLFLEVQNGKQFQYLTIARSVLGGLYQSVVMYFGLYLLFLDDNILNQYGKIGGLAIMGSYCASFSVISILLQAALDIKYWNFIVHIGIWGSILLYIIIALITNSMLPSMPQSYQVFNFSLSLLQFYLMVIIMIFISLIPTFTSKYIKQQFYPSQSQLLQENYILNKRKRRN

SEQ ID NO: 22636 - protein, 1206 aa, Oryza sativa
MATGGGDGRRRGRRRSKMRLSRLYSFACGRRPTAVDDESSSRIGGPGFTRVVNANGGGGIPEYGYRSNSVSTTKYNVVTFVPKSLLEQFRRVANIYFLISACLTYTNLAPYTSASAVAPLVLVLLATMVKEAIEDWRRKQQDTEVNNRKTKVLQDGAFHSTKWMNLQVGDIVKVEKDEFFPADLILLSSSYEDAICYVETMNLDGETNLKLKQSLEASSGLQEDDSFNSFRAVIRCEDPNPHLYSFVGNIEIEEQYPLSPQQILLRDSKLRNTEYVYGVVIFTGHDTKVMQNAMKAPSKRSKIERKMDRIIYLLLSALVLISVIGSVFFGITTRDDLQDGRPKRWYLRPDDSTIYFKPTKAAISAILHFFTAMMLYGNFIPISLYISIEIVKLLQALFINQDIHMYHEETDTPAHARTSNLNEELGQVDTILTDKTGTLTCNSMEFIKCSIAGTAYGRGITEVERAMAKRKGSPLIADMASNTQGSQAAIKGFNFTDERVMNGNWVSQPHSGVIQMFLRLLAVCHTCIPEVDEESGTISYEAESPDEAAFVVAARELGFTFYQRTQTGVFLHELDPSSGKQVDRSYKLLHVLEFNSARKRMSVIVRNEEGKIFLFSKGADSVMFERLSSSDCAYREVTQDHINEYADAGLRTLVLAYRQLDEAEYANFDRKFTAAKNSVSADRDEMIEEAADLLERKLILLGATAVEDKLQKGVPECIDKLAQAGIKIWVLTGDKMETAINIGYACSLLRQGMTQITITLEQPDIIALEKGGGDKAAVAKASKENVVKQINEGKKRIDGSVVGEAFALIIDGKSLTYALEEDAKGALMDLAVGCKSVICCRSSPKQKALVTRLVKESTGKVSLAIGDGANDVGMIQEADIGVGISGAEGMQAVMASDVSIAQFRFLERLLLVHGHWCYSRISAMICYFFYKNITFGVTLFLYEAYTSFSGQTFYNDWALSTYNVFFTSLPVIAMGVFDQDVSARFCLRYPMLYQEGPQNLLFRWSRLLGWMAYGVASGVIIFFLTSAALQHQAFRRGGEVVDLAILSGTAYTCVVWAVNAQMTVTANYFTLVQHACIWGSVALWYVFLLAYGAITPAFSTNYFMLFTDGLAAAPSYWVVTLLVPAAALLPYFTYSAAKTRFFPDYHNKIQWLQHRGSNADDPEFGHALRQFSVRSTGVGVSARRDARDLHLPPPSQSHSHSQTTST

SEQ ID NO: 22637 - protein, 1206 aa, Oryza sativa; identical to SEQ ID NO: 22636

SEQ ID NO: 22638 - protein, 1175 aa, Oryza sativa; identical to SEQ ID NO: 22630

SEQ ID NO: 22639 - protein, 1185 aa, Oryza sativa; identical to SEQ ID NO: 622

SEQ ID NO: 22640 - protein, 1185 aa, Oryza sativa; identical to SEQ ID NO: 622

SEQ ID NO: 22641 - protein, 868 aa, Oryza sativa
TMFTLITLYSTIIPISLYVSIEMIKFIQCTQFINNDLHMYHAESNTPALARTSNLNEELGQVEYIFSDKTGTLTRNLMEFFKCSIAGEIYGTGITEIEKGGAERAGIKIDEGKRSGAAVHEKGFNFDDARIMCGAWRNEPNPEACKEFFRCLALCHTVLPEGEETPEKISYQAASPDEAALVAASKNFGFFFYRRTPTTVIVRESHVERMGSIQDVAYEILNVLEFNSTRKRQSVVCRFPNGRLVLYCKGADNVVYERLADGNNDIKKISREHLEQFGSAGLRTLCLAYRDLSREQYESWNEKFIQAKSSLRDRDKKLDEVAELIEKDLVLVGCTAIEDKLQEGVPACIQTLSAAGIKIWVLTGDKMETAINIAYACSLVNNDMKQFIISSETDVIREAEDRGDPVEIARVIKESVKQSLKSYHEEARGSLISTPGQKLALIIDGRCLMYALDPTLRVDLLGLSLICHSVVCCRVSPLQKAQVASLVKKGAHKITLSIGDGANDVSMIQAAHVGIGISGQEGMQAVMASDFAIAQFRYLTDLLLVHGRWSYLRLCKVITYFFYKNLTFTPSAHASAFQTGFSGQRFYDDWFQSLYNVIFTALPVIMVGLFDKDVSASLSKKYPKLYQEGIRNTFFKWRVIAVWAFFAFYQSIVFYYFTAAASRYGHGSSGKILGLWDVSTMAFTCVVVTVNLRLLMSCNSITRWHYISVAGSITAWFMFIFIYSAIMTSFDRQENVYFVIYVLMSTFFFYLTLLLVPIIALFGDFLYLSIQRWFFPYDYQVIQEMHRDEPHEYSRIQLPETSHLSPEEARSYAISMLPRESSKHTGFAFDSPGYESFFASQQGVGVPHKPWDVARRASMKQRQKTGGS

SEQ ID NO: 22642 - protein, 733 aa, Oryza sativa
  unsure (1)..(733): unsure at all Xaa locations
DTEVNNRKTKVLQDGAFHSTKWMNLQVGDIVKVEKDEFFPADLILLSSSYEDAICYVETMNLDGETNLKLKQSLEASSGLQEDDSFNSFRAVIRCEDPNPHLYSFVGNIEIEEQYPLSPQQILLRDSKLRNTEYVYGVVIFTGHDTKVMQNAMKAPSKRSKIERKMDRIIYLLLSALVLISVIGSVFFGITTRDDLQDGRPKRWYLRPDDSTIYFKPTKAAISAILHFFTAMMLYGNFIPISLYISIEIVKLLQALFINQDIHMYHEETDTPAHARTSNLNEELGQVDTILTDKTGTLTCNSMEFIKCSIAGTAYGRGITEVERAMAKRKGSPLIADMASNTQGSQAAIKGFNFTDERVMNESPDEAAFVVAARELGFTFYQRTQTGVFLHELDPSSGKQVDRSYKLLHVLEFNSARKRMSVIVRNEEGKIFLFSKGADSVMFERLSSSDCAYREVTQDHINEYADAGLRTLVLAYRQLDEAEYANFDRKFTAAKNSVSADRDEMIEEAADLLERKLILLGATAVEDKLQKGVPECIDKLAQAGIKIWVLTGDKMETAINIGYACSLLRQGMTQITITLEQPDIIALEKGGGDKAAVAKASKENVVKQINEGKKRIDGSVVGEAFALIIDGKSLTYALEEDAKGALMDLAVGCKSVICCRSSPKQKALVTRLVKESTGKVSLAIGDGANDVGMIQEADIGVGISGAEGMQAVMASDVSIAQFRFLERLLLVHX

SEQ ID NO: 22643 - protein, 787 aa, Oryza sativa
  unsure (1)..(787): unsure at all Xaa locations
MIKFIQCTQFINNDLHMYHAESNTPALARTSNLNEELGQVEYIFSDKTGTLTRNLMEFFKCSIAGEIYGTGITEIEKGGAERAGIKIDGDEGKRSGAAVHEKGFNFDDARIMCGAWRNEPNPEACKEFFRCLALCHTVLPEGEETPEKISYQAASPDEAALVAASKNFGFFFYRRTPTTVIVRESHVERMGSIQDVAYEILNVLEFNSTRKRQSVVCRFPNGRLVLYCKGADNVVYERLADGNNDIKKISREHLEQFGSAGLRTLCLAYRDLSREQYESWNEKFIQAKSSLRDXXCSLVNNDMKQFIISSETDVIREAEDRGDPVEIARVIKESVKQSLKSYHEEARGSLISTPGQKLALIIDGRCLMYALDPTLRVDLLGLSLICHSVVCCRVSPLQKAQVASLVKKGAHKITLSIGDGANDVSMIQAAHVGIGISGQEGMQAVMASDFAIAQFRYLTDLLLVHGRWSYLRLCKVITYFFYKNLTFTLTQFWFTFQTGFSGQRFYDDWFQSLYNVIFTALPVIMVGLFDKDVSASLSKKYPKLYQEGIRNTFFKWRVIAVWAFFAFYQSIVFYYFTAAASRYGHGSSGKILGLWDVSTMAFTCVVVTVNLRLLMSCNSITRWHYISVAGSITAWFMFIFIYSAIMTSFDRQENVYFVIYVLMSTFFFYLTLLLVPIIALFGDFLYLSIQRWFFPYDYQVIQEMHRDEPHEYSRIQLPETSHLSPEEARSYAISMLPRESSKHTGFAFDSPGYESFFASQQGVGVPHKPWDVARRASMKQRQKTGGS

SEQ ID NO: 22644 - protein, 815 aa, Oryza sativa
  unsure (1)..(815): unsure at all Xaa locations
MASGRPLLDASPRPTQQPPASSLLPPPQPEPPLRADRLAFSLEVPDPFRREPDPSSAASQRGEEEGGGEEESRAVVVGEPSSSEAAAGFAGNGVRTAKYSVLTFLPRNLFEQFRRLSYVYFLAITVLNQLPQVAVFGRGASVLPLAFVLFVTAVKDAYEDLRRHRSDRQENNRLARVLLAPPAAGEFAPKKWKHIRVGDVVRVASSETLPADMVLLATSDPSGVAHVQTVNLDGETNLKTRYAKQETQLRFSQDGGIGGVLHCERPNRNIYGFQANLEIDGKRVSLGPSNIVLRGCELKNTTWAIGVVVYAGKETKVMLNSSGAPSKRSRLETQLNRETVILSIMLIGMCTTASVLAGIWILNHRGDLEFTQFFREKDYTTGKNYNYYGMGMQIFITFLMAVIVYQVIIPISLYISMELVRLGQAYFMGADRDLYDESSRSKFQCRALNINEDLGQIKYVFSDKTGTLTENKMEFQCASIRGVDYCSGKDSCGYSVVVDDLLWTPKMAVKIDHRLLKLLRGGGTDEETKLVLEFFLALAACNTIVPLVLDTRDSKQKLIDYQGESPDEQALVYAAASYGIVLVERTSGYVVIDVLGDRQRFDILGLHEFDSDRKRMSVIVGCPDKTVKLYVKGADSSLFGITKNSLDLDIVRATEAHLHKYSSFGLRTLVIGMRELSQPEFEEWQLAYENASTSVLGRGNLLRSVAANIENNIRILGATGIEDKLQDGVPETIESLRQADIKVWILTGDKQETAISIGYSCXXNDVSMIQMADTRGQGNKHQLGHSSXLHQRSNIFGSSCRSAWAGTDPSGSVLX

SEQ ID NO: 22645 - protein, 339 aa, Oryza sativa
  unsure (1)..(339): unsure at all Xaa locations
XEFPGRPTRPHVLNRKWLQVGKLEKDPDAAFALVIDGKALTFALEDDMKHMFLNLAIECASVICCRVSPKRKWLVTRLVKEGIGKTTLAIGDGANDVGMIQEADIGVGISGVEGMQAVMASDFSISQFRFLERLLVVHGHWCYKRIAQMICYFFYKNIAFGLTIFYFEAFAGFSGQSVDDDWFMLLFNVVLTSLPVISLGVFEQDVSSEICLQFPALYQQGPRNLFFDWYRILGWMANGLYSSLAIFFLNICIFYDQAIRSGGQTADMAAVGTTMFTCIIWAVNMQIALTMSHFTWIQHLFVWGSVGTWYLFIIVYGXXALRSRDNYQILLEVLGPAPX

SEQ ID NO: 22646 - protein, 260 aa, Oryza sativa
  unsure (1)..(260): unsure at all Xaa locations
XPRVRPRVRNSALIDREWKVAEVCQKLEHSLEILGVSAIEDRLQAGVPETIEILRQSGINFWMLTGDKQSTAIQIALLCNLISSEPKGQLLYINGRTVDEVARSLERVLLTMRITTSEPKELAFVVDGWALEIILSRYNEAFTELAALSKTAICCRVTPSQKAQLVKLLKSCDYRTLAIGDXGNDVRMIQQADIGVGISGREGLQAARAADYSVGKFRFLKRLILVHGRYSYNRTAFLSQYSFYKSLLICFIQILFSFLX

SEQ ID NO: 22647 - protein, 290 aa, Oryza sativa
  unsure (1)..(290): unsure at all Xaa locations
XSFITTEYMVTLDLAKGVYAKFIDSNVRSGNMYACSFRNARFLDAVSRNDPDIAKFLMVMALCSTVVPIKRNDGTITYQAQSQDEEALVTAASKLNMVLASKDSNTAEISFNGCKFYYDLLDILEFTSDRKRMSAVVKDVQSGKILLLSKGADEAILPRCHQGQQIRTYLETVEMYSQLGLRTLCLGWRELEEDEYKDWSKTFQDASCSLENRERKIAEVCHRLEQDLQILGVSAIEDRLQDGVPETIKLLKSAGINVWMLTGDKQHTAIQIGLLCNLIAPGTALSLEIX

SEQ ID NO: 22648 - protein, 289 aa, Oryza sativa
  unsure (1)..(289): unsure at all Xaa locations
MGSRIKEMVRVATARLGGEPSPRGGAGNSAFGRGESSRTARLGGGGASLRRQPQPQAPSVRTICCNDREANAPVGYKGNSVSTTKYNVLTFLPKGLFEQFRRVANLYFLMISILSTTPISPVHPVTNVVPLSLVLLVSLIKEAFEDWKRFQNDMSINNAHVDVLQGQKWETTPWKRLQVGDIVRIKQDGYFPADLLFLSSTNPDGVCYIETANLDGETNLKIRKALEKTWDYKNPEKAFEFKGEIQCEQPNNSLYTFTGNLIVDKQTMPLSPNQVLLRNCGANTLKYSX

SEQ ID NO: 22649 - protein, 389 aa, Oryza sativa
  unsure (1)..(389): unsure at all Xaa locations
XHTPHPPSXVINHQWLXAVVKMAVVCXCSSCPPVXXLMASAADARPDTVDDAAANDAGMLQEADIGVGISGVEGMQAVMASDFAIAQFRFLERLLLIHGHWCYRRISVMICYFFYKNVTFGVTIFLYEAFASFSGAGARTGWFLSLYNVIFTSLPVIALGVFDQDVSQRLCLHYPGLYQEGVQNILFSWRRILGWMANGVINAILIFYFCTTAFGIQAFRQDGQVAGLDALGVLMYTCVVWVVNCQMALSVNYFTIIQHIFIWGSIAVWYLFLLAYGAVDPRFSKSAYMVFIEQVAPALSYWLVTLFAVMATLIPYFCYAAIQIRFFPMFHNKIQWKRHLGKAEDPEVARQXCRHDTGTSSHQRMVGISARRDGKAMQVTKETELQVQG

SEQ ID NO: 22650 - protein, 216 aa, Oryza sativa
  unsure (1)..(216): unsure at all Xaa locations
LYSFIGTMEWKDKQYNLSPQQLLLRDSKLRNTDYIYGAVIFAGHDTKVMQNATDPPSKRSKIEKRMDKIIYVLMSSLLVIALLGSVLFGIWTKEDLMNGEMKRWYLRPDDSTIFYDPKRAALASFFHLLTALMLYSYFIPISLYISIEMVKILQALFINQDIEMYHEESDKPTHARTSNXNEELGQVDTXVLSDKTGTLTCNMMSSIKCSIAGIGX

SEQ ID NO: 22651 - protein, 193 aa, Triticum aestivum
  unsure (1)..(193): unsure at all Xaa locations
XPKQKALVTRLVKTGTGKVTLAIGDGANDVGMIQEADIGVGISGAEGMQAVMASDVSIAQFRFLERLLLVHGHWCYSRISSMVCYFLYKNITFGVTLFLYESFSTFSGQTLYNDWSMSLYNVLFTSLPVIAMGVFDQDVSARFCLKYPMLYQEGPQNLLFRWSRLLGWMLHGVGSAVIIFFLTIASLKHQAFR

SEQ ID NO: 22652 - protein, 192 aa, Triticum aestivum
  unsure (1)..(192): unsure at all Xaa locations
QNXGPLMVKHLKVEYKTSSXLGXIANDKSVNIEESPNFDDAELALIIDGNSLVYILEKDLESELFDLATSCKVVICCRVAPLQKAGIVDLIKSRTSDMTLAIGDGANDVSMIQMADVGVGICGQEGRQAGMASDXXLGQFRFLKRMLLVHGHWNYQRMAXMILYNFYRKAGFVLMLFWYILHTAYSATLALX

SEQ ID NO: 22653 - protein, 247 aa, Triticum aestivum
  unsure (1)..(247): unsure at all Xaa locations
XXRSASERAGSQRDLRDEDARFVYINDAPRTNAPPAMFPDNSIHTSKYSVLTFIPRNLYEQFHRVAYIYFLVLAVLNFVPQLLVLSKEAGVLPLAFVLGVTAVKDAYEDWRRHRSDKNENNRTASVLADGVFRPKRWKDIQVGDVVRLVANETLPXDMVLVSTSDPTGVAYIQTINLDGESNLKTRYAKQETMXXTPPEALAGVIKCEKPNRNICGFLATVDLNGRRAISLGASNVMLRGCELKNTX

SEQ ID NO: 22654 - protein, 181 aa, Triticum aestivum
  unsure (1)..(181): unsure at all Xaa locations
LCLGWRDLKESEYKEWSKNFQEASCSLDNREFKMSEVCHSLERDLHILGVTAIEDRLQDGVPETIKLLRNAGINVWMLTGDKQNTAVQIGLLCNLITSEPNSQLLSISGKTEEDILRSLERALLIMKNTSETKDLALXLXDGWALEIILKHSKESFIDLAMLSKTAIXCCRMTPLQKAQSX

SEQ ID NO: 22655 - protein, 198 aa, Triticum aestivum
  unsure (1)..(198): unsure at all Xaa locations
XPASGLXTLVLAYRQLEEIEYAKFERKFTAAKNSVSADRDELIDEAADLIERDLILLGATAVEDKLQKGVPDCIDKLAKAGIKIWVLTGDKMETAINIGYACSLLRQGMKQITITLDTPDIIALEKGGDKGAINKASKVSVVQQISEGKKLINASXXNESFALIIDGKSLTYALKDDAQAAFLDLTIACGSVICCRSX

SEQ ID NO: 22656 - protein, 219 aa, Triticum aestivum
  unsure (1)..(219): unsure at all Xaa locations
XTRPDSSSGSRFQCRSLNINEDLGQIRYIFSDKTGTLTQNKMEFQQASIYGRNYGSSLPSDSSHEITIAESSSQHDRKPKSEINVDALLLALLKQPLFGEERLAAHDFFLTLAACNTVIPVSTGGSPDLTNEVSEVGAIDYQGESPDEQALVIAASAYGYKLVERTTGHIVIDVQGERIRLDVLGLHEFDSVRKRMSVVVRFPDDTVKVLVKGADTSMX

SEQ ID NO: 22657 - protein, 119 aa, Triticum aestivum
  unsure (1)..(119): unsure at all Xaa locations
XGRVGEIILTRYKEAFTELAVLSKTAICCRVTPSQKAQLVKLLKSCDYRTLAIGDGGNDVRMIQQAHIGVGISGREGLQAARAADYSIGKFRFLKRLILVHGRYSYNRTAFLSQYSFYK

SEQ ID NO: 22658 - protein, 318 aa, Triticum aestivum
  unsure (1)..(318): unsure at all Xaa locations
SNQLSKFNYYVDILFLMQICYFFYKNVTFGVTIFLYEAFASFSGKPAYNDWFLSLYNVFFTSLPVIALGVFDQDVSSRLCLQYPELYQEGVQNVLFSWRRILGWMFNGVVNAILIFFFCTTALKDQAFRQDGQAAGLDALGATMYTCVVWVVNCQMALSVNYFTGTRHIFIWGSITVWYIFLMVYGAIDPKYSKTAYMVFIEQLAPALSYWLVTLFVVTATLVPYFCYAAIQIRFFPMFHNKIQWKRYLGKAEDPEVARQLSSRHRTSSHQRMVGISARRDGKAMQVKKGTDVXRLKDDILSVDFVFCTDYRMSSPER

SEQ ID NO: 22659 - protein, 193 aa, Triticum aestivum
  unsure (1)..(193): unsure at all Xaa locations
XVRVITYFFYKNLTFTLTQFWFTFQTGFSGQRFYDDWFQSLYNVIFTALPVIMVGLFDKDVSASLSKKYPQLYQEGIRNTFXFKWKVIAVWGFFAFYQSIVFYYFTAAASQHGHGSSGKILGQWDVSTMAFTCVVVTVNLRLLMSCNSITRWHYFSVAGSIAAWFLFIFIYSAIMTSFDRQENVYFVIYVLMS

SEQ ID NO: 22660 - protein, 93 aa, Triticum aestivum
  unsure (1)..(93): unsure at all Xaa locations
XDEILNVLEFNSTRKRQSVVCRFPNGKLVLYCKGADNVIYERLADGNYDIKKTSREHLEQFGSAGLRTLCLAYRDLSMDQYKSWNEKFVQAKS

SEQ ID NO: 22661 - protein, 164 aa, Triticum aestivum
  unsure (1)..(164): unsure at all Xaa locations
XSGGHKEKQIEESPHVKGFNLKDPRIMDGNWIHEPNKDVIRDFFRLLAICHTCIPEVDETDKVSYEAESPDEAAFVIAARELGFEFYKRTQTSIFIRERDPSQNVADYQYRKYELLNVLEFSSSRRRMSVIVKEPEPEGRILLFSKGADSVMFTRLAPDGRKFE

SEQ ID NO: 22662 - protein, 126 aa, Triticum aestivum
  unsure (1)..(126): unsure at all Xaa locations
IPISLYVSIEVVKVAQAHFINQDIHMFDEETGNTAQARTSNLNEELGQVHTILSDKTGTLTCNQMDFLKCSIAGVSYGVRASEVERAAAKQMASGAADHDNPVEDVWESNEDEIQLVEGVTFSVGX

SEQ ID NO: 22663 - protein, 202 aa, Triticum aestivum
  unsure (1)..(202): unsure at all Xaa locations
SKSNPLLTEKPKIQRKDRANPARFGPRSRAWSTGRFREISRGFLQRLVWRRRGQDELADKGDGAGGHCTAGRRAFAAGGAFSARARXESSRTARLGGGGASLRRQPQPQAPTVRTIYCNDREANAPVAYKGNSVSTTKYSVLTFLPKGLFEQFRRVANLYFLMISILSTTPISPVHPVTNVVPLSLVLLVSLIKEAFEDWKX

SEQ ID NO: 22664 - protein, 765 aa, Zea mays
  unsure (1)..(765): unsure at all Xaa locations
PTRPNQDQNMYCAESDKPARARTSNLNEELGQVHTILSDKTGTLTCNSMEFLKCSIAGVAYGSRPTEVETCYGEIVETNGSFGRKDTTEFKRSVKGFNFTDSHLMNGRWAKECSRDAIEMFFRVLAVCHTAIPVADGNSAGMPYEAESPDEAALVTAAREFGFEFYHRTQTTISVHEYDPVVGGKVDRTYKLLNILEFSSARKRMSVIVRTEEGRLFLFCKGADSVIFERLSKDNGTAHLTKTKCHIDEYSEAGLRTLALAYCELTEEQYVVWNQDYSSAKNSVHTDHVAAVEKVSEDIEKDLVLLGATAVEDRLQNGVPECIYKLAQAGIKIWILTGDKLETAVNIGYACNLLRKEMEEIFITLENSSTSASEGSSGEGNKIATFEEIDRKLKDARGKISQKGTSTSFALIIDGNALTHALTGSLKNSFLDLAVNCASILCCRVSPKQKALVTRLVKIRTSKTTLAIGDGANDVGMLQEADIGVGISGAEGMQAVMASDFAIAQFRFLERLLLVHGHWCYRRIAAMICYFFFKNITFGFTLFWFEAHAMFSAQPAYNDWFISFYNVAFTSLPVIALGVFDKDVSSHVCLEVPSLHQDGVNNVFFSWSRILSWMLNGMCCSIIIYFGSLNAILVQAVRQDGRVAGFDILGVTMYTCVVWTVNCQLALYISYFTWIQHFVIWGSILIWYTFLVIYGLFSPAISTTAYHVFVEACAPSPLYWLSTLMIVVTALIPFFVYKISRTLYYPQYHDQVQRANXKELVVPVV

SEQ ID NO: 22665 - protein, 714 aa, Zea mays
  unsure (1)..(714): unsure at all Xaa locations
MMLLGTAYGKGVTEVERAMAMRKGDSLDDDIENGDYKDKKNHNSPNVKGFNFKDPRIMDGNWIHEPNKDMIRDFFRLLAICHTCIAEIDENEKVSYEAESPDEAAFVIAARELGFEFYKRSLATIIIREQDPSWNVVEKRYRKYELLNILEFSSSRRRMSVIVKEPEGRILLLSKGADSVMFKRLAPNGRKYEEETRRHINEYSDSGLRTLVLAYRVLDEKEYKEFNEKLNTAKASVSADRDVKIEQAADSIEQDLILLGATAVEDKLQQGVPECIDKLAQAGIKIWVLTGDKMETAINIGFACSLLRQDMTQIIVTLEQPDIIALEKDGDKYKIFKASKKKVMSQIEDGIKQIPPSTKTSFALIIDGKSIPYALEDDVKFKFLDLAINCASVICCRSSPKQKALVTRFVKQVTHKVTLAIGDGANDVGMLQEADIGVGISGAEGMQAVMASDVAVAQFRFLERLLLVHGHWCYRRISVMICYFFYKNVTFGVTLFLYEAFASFSGKPAYNDWFLSLYNVFFTSLPVIALGVFDQDVSARLCIQYPQLYQEGVQNILFSWCRILGWMLNGVMNAVLIFFFCITTFEDQVFRRDGQVAGLDALGVAXVHLYCMGCQLSNGALCELLHHNPAHIHMGQHCSMVPLPHSLWFHEPEVLNYSLHGLHRTAGPSPLILVGDTFCCAGNTCPLLHVCRDPDPVFPNVPQQDSVEAVLGEG

SEQ ID NO: 22666 - protein, 665 aa, Zea mays
  unsure (1)..(665): unsure at all Xaa locations
KKTSIEHLEQFGSAGXRTLWVAYRDLSXEQYESLNEKFVQAXSSLRDRDKKLVRCXXLIEKDLILIGCTAIQDKLQEGVPTCIETLSAVGIKIWVLTGDKMETAINIAYACSLVNNDTKQFIISSETDTNGXAEDRGDPVEIARGIKDSVKQNLKRFHEEARHSLISTPERKLALIIDGRCLMYALDPTLRVDLLGLSLSCHSVVCCRVSPLQKAQVTSLVRKGAQKITLSIGDGANDVSMIQAAHVGIGISGQEGMQAVMASDFAIAQFRFLTDLLLVHGRWSYLRLCKVITYFFYKNLTFTLTQFWFTFQTGFSGQRFYDDWFQSLYNVIFTALPVIIVGLFDKDVSASLSKKYPQXFTREGIRNSFFKWRVIAVWGFFAFYQSIVFFYFTAAASRHGQGSSGKILGLWDVSTMAFTCVVVTVNLRLLMACNSITRWHYISVAGSIVAWFMFIFIYSAIMTSFDRQENVYFVIYVLMSTFFFYLTIVLVPIIALFGDFLYLSIQRWLFPYDYQIIQEQHKDEPHEYSRVPLPETSHLSPEEARSYMISMLPRESSKHTGFAFDSPGYESFFASQQGIGVPHKPWDVARRASMKXRNEQENPSRANTSPLCKVLYIWFLDHRSFCIGSSTVALFSCLSPICCFGMKSRQRSVWLLNNHVGILGR

SEQ ID NO: 22667 - protein, 642 aa, Zea mays
  unsure (1)..(642): unsure at all Xaa locations
DPFANLHMVLVSKNGNNAEIHFNRRVMQYEILDILEXTSDRKRMSIVILDCQSGKFFLLSKGADEAMLPCAYSGQKTKTFVDAVDKYAQLGLRTLCLGWRELEPEEYTKWSQSFKEANSSLNDREWKVAEVCQKLEHSLEILGVSAIEDRLQDGVPETIEILRQSGINFWMLTGDKQSTAIQIALLCNLISSEPKGQLLHINGKTQDEVARSLERVLLTMRITSSEPKELAFVVDGWALEIILSRYTEAFTELAVLSKTALCCRVTPSQKAQLVKLLKSCDYRTLAIGDGGNDVRMIQQADIGVGISGREGLQAARAADYSIGKFRFLKRLILVHGRYSYNRTAFLSQYSFYKSLLICFIQILFSFLSGIAGTSLFNSVSLMAYNVFYTSIPVLTTVLDKDLSEKTVMQNPEILLYCQAGRLLNPSTFAGWFGRSLYHAIIIFLITIHAYANEKSEMEELSMVALSGSIWLQAFVVTLEMNSFTSVQLLAIWGNLIAFYALNFFISSIPTSGMYTIMFRLCRQPSYWITLVLISGVGMGPVLALKYFRYTYRPSVINILQKAERSRGPMYTLLNLESQLRSDSMMVXPVPQRQXKNKSSVYEPLLSDSPMASRRSLAPASSFDIFQPAXXSRTSHPRNIKAN

SEQ ID NO: 22668 - protein, 396 aa, Zea mays
  unsure (1)..(396): unsure at all Xaa locations
RCCRTELLNQPLIGEERLSAHDFFLTLAACNTVIPVNTDSHDLTNEVGGDRCXIDYQGESPDEQALVIAASAYGYTLVERTTGHIVIDVLGERLRLDVLGLHEFDSVRKRMSVIVRFPDNNVKVLVKGADTSMLNILKVEIDDELYDSLHVKIREATENHLSAYSSEGLRTLVIGSKNLTDAEFSEWQEMYEEASTSMHERSAKLRQAAGLVECNLTLLGATGIEDKLQDGVPEAIDSLRQAGIKVWVLTGDKQETAISIGLSCRLLTQTMHSIIINGSSEVECRRLLAEAKAKFXXIKSADFGSEYSENVTNFDGTELALIIDGSSLVYILEKPLESQLFDLATSCKVVICCRVAPLQKAGIVDLIKSRTSDMTLAIGDGANDVSMIQMADGGGX

SEQ ID NO: 22669 - protein, 376 aa, Zea mays
  unsure (1)..(376): unsure at all Xaa locations
XCHIDEYSEAGLRTLALAYCELTEEQYVVWNQDYSSAKNSVHTDHVAAVEKVSEDIEKDLVLLGATAVEDRLQNGVPECIYKLAQAGIKIWILTGDKLETAVNIGYACNLLRKEMEEIFITLENSSTSASEGSSGEGNKIATFEEIDRKLKDARGKISQKGTSTSFALIIDGNALTHALTGSLKNSFLDLAVNCASVLCCRVSPKQKALVTRLVKIRTSKTTLAIGDGANDVGMLQEADIGVGISGAEGMQAVMASDFAIAQFRFLERLLLVHGHWCYRRIAAMICYFFFKNITFGFTLFWFEAHAMFSAQPAYNDWFISFYNVAFTSLPVIALGVFDKDVSSHVCLEVCNLSDSYINHSFCSLSKKKKKKKKKKK

SEQ ID NO: 22670 - protein, 601 aa, Zea mays
  unsure (1)..(601): unsure at all Xaa locations
LDEEDAVAAVPHGRLAVXVTFAANLRSGSKAESTASSLESFRFQHGSASGTPAVFSRSQRDLRDEDARFVYINDADRTNAPPAGLPDNSIHTTKYSVVTFLPRNLYEQFHRVAYLYFLVLVALNMVPQLGVFTPAASVLPLAFVLGVTAVKDAYEDWRRHRSDRNENNRTASVLVGGVFVPKRWKEVQVGEVLRVVANETLPCDMVLLSTSDPTGVAYVQTINLDGESNLKTRYAKQETMXXTPPEALAGVIKCEKPNRNIYGFLATVDLDGRRAVSLGPSNIVLRGCELKNTTWAIGVAVYTGRDTKVMLNSSGAPSKRSRLETRMNRETIILAVVLFVLCAIVSVLAGVWLGDHSDELGVIPFFRKRDFSEDDPDATYKWYGMGAEVAFTFMKSVIIFQVMIPIALYISMEIVRVGQAFFMVQDRHMFDDKRQAKFQCRALNINEDLGQIKYVFSDKTGTLTENRMEFRCASVHGADFSDTAGAGADDGHSVIGEDGVALRPKTAVKTDPELVALLKDGGGGASADRARDFLLTLATCNTIVPIVXSTTTPPAGRLLEYQGESPDEQALVYAAAAYGYTLVERTSGHVTVDVLGSRQRY

SEQ ID NO: 22671 - protein, 699 aa, Zea mays
  unsure (1)..(699): unsure at all Xaa locations
LAAERTKSSAQQHATGTAIAAAAAVTRDGGRGGSTRNGRAHQVARPSGVAYTEALVCQLDEEDAVAAVPHGRLAVXVTFAANLRTGSKAESTASSLESFRIQHGSATGTPAVFSRSQRDLRDEDARFLYINDTDRTNAPTAGLPDNSIHTTKYSVDTFLPRNLYEQFHRVAYLYFLVLVALNMVPQLGVFTPAASVLPLAFVLGVTAVKDAYEDWRRHRSDRNENNRTASVLVGGVFVPKRWKEVQVGEVLRVVANETLPCDMVLLSTSDPTGVAYVQTINLDGESNLKTRYAKQETMXXTPPEALAGVIKCEKPNRNIYGFLATVDLDGRRAVSLGPSNIVLRGCELKNTTWAIGVAVYTGRDTKVMLNSSGAPSKRSRLETRMNRETIILAVVLFVLCAIVSVLAGVWLGDHSDELGVIPFFRKRDFSEDDPDATYKWYGMGAEVAFTFMKSVIIFQVMIPIALYISMEIVRVGQAFFMVQDRHMFDDKRQAKFQCRALNINEDLGQIKYVFSDKTGTLTENRMEFRCASVHGADFSDTAGAGADDGHSVIGEDGVALRPKTAVKTDPELVALLKDGGGGASADRARDFLLTLATCNTIVPIVXSTTTPPAGRLLEYQGESPDEQALVYAAAAYGYTLVERTSGHVTVDVLGSRQRPTKLRXGAHAWQCVRXPEACVGGAAVLDQDLFVLSNSIVRX

SEQ ID NO: 22672 - protein, 389 aa, Zea mays
  unsure (1)..(389): unsure at all Xaa locations
XRPGXTLALIVDGNSLVXILETDLQDELFKLATECSVVLCCRVAPLQKAGIVALIKNRTNDMTLAIGDGANDVSMIQMADVGIGISGQEGRQAVMASDFSMGQFRFLVPLLLVHGHWNYQRMAYMILYNFYKNAMFVLVLFWYVLYTAFTLTTAITEWSSLLYTVLYTSLPTIVVGILDKDLNKATLIAYPKLYGSGQRDDKYNVNLFVLNMLEALWQSLVVFYLPYFAYRRSTIDMSSLGDLWALAPVIVVNMQLAMDIIRWNWIIHAFVWGTIAATTVCLFVIDSIWVLPGYGAIFHIMGTGLFWFLLLIIVVTAMVPHFVFKAFTEHFRPSDIQIAREMEKFANVNQVNRLEFPTRGLXHDNSRETIVFRSFLIFTSFPPTGVNRS

SEQ ID NO: 22673 - protein, 351 aa, Zea mays
  unsure (1)..(351): unsure at all Xaa locations
XDLLQQQQQQMASSNSISTTKYNLFTFLPKSLFEQFRRVANIYFLLSAGIAYSPLAAYSSSSAIAPLVIVLVATMIKEAIEDWRRNQQDTEVNNRKTQVFQVNNIGGGGGFRDAKWKDIRVGDIVKVHKDEFFPADLVLLSSSYDDAICYVETMNLDGETNLKLKQSLEATSASLPPDDGDSFGAFRGAVVRCEDPNAHLYTFVGNIEMDGRQHPLSPQQLLLRDSKLRNTDFVYGVVVFTGQDTKVMQNSMKVPSKRSNVEKKMDRVMYLLLFSLIVISVVSSVFFGIATRDHGRTMRRWYLRPDDTEIYYDPKRPAVAAVLHFFTAIMLYGYFIPISLYISIEIVKLLQ

SEQ ID NO: 22674 - protein, 381 aa, Zea mays
VYSTLSIGDGANDVSMIQAAHVGIGISGQEGMQAVMASDFAIAQFRFLTDLLLVHGRWSYLRLCKVITYFFYKNLTFTLTQFWFTFQTGFSGQRFYDDWFQSLYNVIFTALPVIIVGLFDKDVSASLSKKYPQLYKEGIRNSFFKWRVIAVWGFFAFYQSIVFFYFTAAASRHGQGSSGKILGLWDVSTMAFTCVVVTVNLRLLMACNSITRWHYISVAGSIVAWFMFIFIYSAIMTSFDRQENVYFVIYVLMSTFFFYLTIVLVPIIALFGDFLYLSIQRWLFPYDYQIIQEQHKDEPHVYSRVQLPETSHLSPQEARSYMMSMLPRESSKHTGFAFDSPGYESFFASQQGVGVPHKPWDVARRAKHEAATSRKSLISAV

SEQ ID NO: 22675 - protein, 370 aa, Zea mays
  unsure (1)..(370): unsure at all Xaa locations
XFGTRQSCFSSTDNSLNLDVRLVNAVSSNDPDVIKFLLVMALCNTVVPIKSNDGTVSYKAQSQDEEALVNAAAKLNMMLISKDTITAEICFNGSKFWYELLDILEFTSDRKRMSVVVKEGETGKILLLSKGADEALLPRACPGQQIQRYLEAVEMYSQLGLRTLCLGWRDLKENEYKEWSKNFQKASCSLDNREFKIAEVCNSLEQDLQILGVTAIEDRLQDGVPETIKLLRNAGINVWMLTXGDKQNTAIQIGLLCNLITSGPNSQLLSISGKTEEDVLRSLERALFIMKNTSETKGLAFVLDGWALELILKHSKESFTRLAMLSKTAICCRMTPLQKAQSSSFLRDXXYLFMGDSYNRTAFISQYSFY

SEQ ID NO: 22676 - protein, 320 aa, Zea mays
  unsure (1)..(320): unsure at all Xaa locations
LQALFINHDIHMYHEETDTPAHARTSNLNEELGQVDTILTDKTGTLTCNSMEFIKCSIAGTAYGRGVTEVERAMARKKGSAAAADNTDKAKNKPAATKGFNFVDERVMGGNWVHQPRSDAIEMFFRLLAVCHTCIPEVDQESGKISYEAESPDEAAFVVAARELGFTFYKRTQTGVYLRELDPSSGKQVDRSYRILNVLEFNSARKRMSVIVKDEEGKLFLFTKGADNVMFERLSGSGSAHRDVTQQHINEYADAGLRTLVLAYRELKADEYAHFDRQFAAAKNSVSADRDEKIDEAADLVERDLLLLGATAVEDKLQVX

SEQ ID NO: 22677 - protein, 380 aa, Zea mays
  unsure (1)..(380): unsure at all Xaa locations
XRVEYERQVYALDPSQILLRDSKLRNTAFIYGVVIFTGHDSKVMQNSTESPSKRSRIEEKMDLIIYILFTVLVLISLISSIGFAVRIKLDLPRWWYLQPEKSNKLDDPSRPALSGIFHLITALILYGYLIPVSLYVSIELVKVLQAHFINQDIHMFDEDTGNTAQARTSNLNEELGQVHTILSDKTGTLTCNQMDFLKCSVAGVSYGVGSSEVERAAAKHMASGADDHDIPLQDIWEENNDDEIELVGVNFSVGTNIKPSIKGFSFVDDRLMQGNWTKEPNSSTILLFFRILALCHTAIPEINEATGSIAYEAESPDEGAFLVAAREFGFEFFKRTQSSVFVREKHTSSKDTVEREFKILNLLEFSSKRKRMTVILQACX

SEQ ID NO: 22678 - protein, 268 aa, Zea mays
  unsure (1)..(268): unsure at all Xaa locations
LQKPLKYITNYITTTKYNVVTFFPKAIFEQFRRVANLYFLLTAILSLTPVCPFSAVSMIAPLAFVVGLSMMKEGLEDWRRFMQDMKVNNRNVSVHKSDGEFDYRHWEDLCVGDVVRVEKDQFFPADLLLLSSSYEDGICYVETMNLDGETNLKVKRSLEVTLPLEEDESFKDFQAVIRCEDPNPSLYTFTGNFEYERQVYALDPSQILLRDSKLRNTAFVYGVVIFTGHDSKVMQNSTESPSKKSRIERKMDLIIYILVTVLVLISLX

SEQ ID NO: 22679 - protein, 635 aa, Zea mays
  unsure (1)..(635): unsure at all Xaa locations
XGLVSKNGNNAEIHFNRRVMQYEILDILEXTSDRKRMSIVILDCQSGKFFLLSKGADEAMLPCAYSGQKTKTFVDAVDKYAQLGLRTLCLGWRELEPEEYTKWSQSFKEANSSLNDREWKVAEVCQKLEHSLEILGVSAIEDRLQDGVPETIEILRQSGINFWMLTGDKQSTAIQIALLCNLISSEPKGQLLHINGKTQDEVARSLERVLLTMRITSSEPKELAFVVDGWALEIILSRYTEAFTELAVLSKTALCCRVTPSQKAQLVKLQKSCDYRTLAFDQQLTRNSMAYQNDKKKRCQSNXICCIFRFSRYCPKRYNEKSYLILYSCXQKWVVTIYXFSMGNKLISPIHQMQKNKLMSQSXAKKKKKTVSLMAYNVFYTSIPVLTTVLDKDLSEKTVMQNPEILLYCQAGRLLNPSTFAGWFGRSLYHAIIIFLITIHAYANEKSEMEELSMVALSGSIWLQAFVVTLEMNSFTSVQLLAIWGNLIAFYVLNFFISSIPTSGMYTIMFGLCRQPSYWITLVLISGVGMGPVLALKYFRYTYRPSVINILQKAERSRGPMYTLLNLESQLRSDKDSMMVAGSTAPAKNKSSVYEPLLSDSPMASRRSLAPASSFDIFQPAXXSRTSHPRNIKAN

SEQ ID NO: 22680 - protein, 261 aa, Zea mays
  unsure (1)..(261): unsure at all Xaa locations
XACLQKPLKYITNYITTTKYNIITFFPKAIFEQFRRVANLYFLLTAILSLTPVCPFSPVSMIAPLAFVVGLSMMKEGLEDWRRFIQDMKVNNRYVSTHKGDGEFDYRHWEDLCVGDVVRVEKDQFFPADLLLLSSSYEDGICYVETMNLDGETNLKVKRSLEVTLPLEEDESFKDFQAVIRCEDPNPSLYTFTGNFEYERQVYALDPSQILLRDSKLRNTAFIYGVVIFTGHDSKVMQNSTESPSKRSRIEKKMDLIIYIX

SEQ ID NO: 22681 - protein, 301 aa, Zea mays
MYHEETDTPAHARTSNLNEELGQVDTILTDKTGTLTCNSMEFIKCSIAGTAYGRGVTEVERAMARKKGSAAAADNTDKAKNKPAATKGFNFVDERVMGGNWVHQPRSDAIEMFFRLLAVCHTCIPEVDQESGKISYEAESPDEAAFVVAARELGFTFYKRTQTGVYLRELDPSSGKQVDRSYRILNVLEFNSARKRMSVIVKDEEGKLFLFTKGADNVMFERLSGSGSAHRDVTQQHINEYADAGLRTLVLAYRELKADEYAHFDRQFAAAKNSVSADRDEKIDEAADLVERDLLLLGATA

SEQ ID NO: 22682 - protein, 243 aa, Zea mays
  unsure (1)..(243): unsure at all Xaa locations
KKTSIEHLEQFGSAGXRTLWVAYRDLSXEQYESLNEKFVQAXSSLRDRDKKLVRCXXLIEKDLILIGCTAIQDKLQEGVPTCIETLSAAGIKIWVLTGDKMETAINIAYACSLVNNDTKQFIISSETDTIREAEDRGDPVEIARVIKDSVKQNLKRFHEEARHSLISTPERKLALIIDGRCLMYALDPTLRVDLLGLSLSCHSVICCRVSPLQKAQVTSLVRKGAEKITLSIGDGAHDVSMTX

SEQ ID NO: 22683 - protein, 391 aa, Zea mays
  unsure (1)..(391): unsure at all Xaa locations
XQRPKGIAQXFIYVLXLHEVKKXMKTYTFSGANDVSMIQMADVGIGISGQEGRQAVMASDFAMGQFRFLVPLLLVHGHWNYQRMAYMILYNFYRNATFVFVLFWYVLYTGFTLTTAITEWSSVLYSVIYTAVPTIVVAILDKDLSRRTLLKYPQLYGPGQRDENYNLRLFIFIMIDSVWQSLACFFIPYLAYRKSIIDGSSLGDLWTLSVVILVNIHLAMDVIRWNWITHAAIWGSIAATWICVMIIDSIPIMPGFWAIYKVMGTGLFWALLLAVTVVGMIPHFAAKAFSEYFIPSDIQIAREMEKSQDFHDVTHPEVQMSTVSRAXGRGLHSDLLFIRVGYSSTLSLVLFVVCTGNSFSSVQAFLMLAPLPTIQRIGPLYHSVYPPAKFC

SEQ ID NO: 22684 - protein, 220 aa, Zea mays
  unsure (1)..(220): unsure at all Xaa locations
XGRCGSDTRDSKGKLIDYQGESPDEQALAYAAASYGIVLVERTSGYIVIDVLGDRQRFDILGLHEFDSDRKRMSVIVGCPDKTVKLYVKGADSSVFGITNNSSELDIVRATEAHLHKYSSLGLRTLVVGMRKLSQSEFEEWQLAYENASTAVLGRGNLLRSVAANIEINVNILGATGIEDKLQDGVPEAIESIRQADIKVWILTGDKQETAISIGYSCKX

SEQ ID NO: 22685 - protein, 200 aa, Zea mays
  unsure (1)..(200): unsure at all Xaa locations
LSAYXSSEGLRTLVIGSKNLTDAEFSEWQEMYEEASTSMHERSAKLRQAAGLVECNLTLLGATGIEDKLQDGVPEAIDSLRQAGIKVWVLTGDKQETAISIGLSCRLLTQTMHSIIINGSSEVECRRLLAEAKAKFGINFDGTELALIIDGSSLVYILEKPLESEVFDIFFNCGIFLIYWSIKWQSLLHILQHIRNFCRX

SEQ ID NO: 22686 - protein, 330 aa, Zea mays
  unsure (1)..(330): unsure at all Xaa locations
XQAVMASDVSIAQFRFLERLLLVHGHWCYSRISSMICYFFYKNITFGVTLFLYDAYTSFSGQPVYNDWAMASFNVFFTSLPVVAMGVFDQDVSARFCLKFPMLYQEGPQDLLFQWRRIIGWMVNGVASAVIIFFLCTASLQHQAFRSGGEVADMATLGATAYTCIVWAVNLQMYITVSYFTLVQHVCIWLSVGLWYVFLPVYGAIAPSFSTTYYMVFVEALAGAPSYWVVTLLVSAASLVPYFTYTVVKSWFFPDYHNRIQWLRHRAETSADVELSQVLRQFSVRSTGVGVSARRDATAVLRRLNSTTQRADYSQSPPTPGVAVVVAADR

SEQ ID NO: 22687 - protein, 254 aa, Zea mays
  unsure (1)..(254): unsure at all Xaa locations
XQAVMASDVSIAQFRFLERLLLVHGHWCYSRISSMICYFFYKNITFGVTLFLYDAYTSFSGQPLYNDWAMASFNVFFTSLPVVAMGVFDQDVSARFCLKFPMLYQEGPQHLLFQWRRIIGWMVNGVASTVIIFFLCTASLQHQAFRSGGEVADMATLGATAYTCIVWAVNLQMYITVSYFTLVQHVCIWLSVGLWYVFLPVYGAIAPSFSTTYYMVFVEALAGAPSYWVVTLLVSAASLVPYFTYAVVKSVFFX

SEQ ID NO: 22688 - protein, 161 aa, Zea mays
  unsure (1)..(161): unsure at all Xaa locations
XHXLQDGVPEAIEKLREAGIKVWVLTGDKQETAISIGYSCKLLTRDMTQIVINSRSRESCRKSLEDAIAMVNKYQSFSTDPQLXXVPLALIIDGNSLVYIFDTDWEEKLFEIAIACDVVLCCRVAPLQKAGIVDLIKKRTSDMTLAIGDGTLXIFQLKMXD

SEQ ID NO: 22689 - protein, 151 aa, Zea mays
  unsure (1)..(151): unsure at all Xaa locations
CRYDVLGLHEFDSDRKRMSVIIGCPDKSVKLFVKGADSSMFGVIDKTANSDVVQATEKHLHSYSSLGLRTLVIGMRELSQEEFQEWQMAYEKASTALLGRGNQLRNVAANIERNLRLLGATGXIDDKLQDGVPESXXETEESGIKVWVLTX

SEQ ID NO: 22690 - protein, 332 aa, Zea mays
  unsure (1)..(332): unsure at all Xaa locations
XCSSRRQPPSWRSDVFFFLTHFYLAVVWWYSSIGFVVRIKLDFPHWWYLQSQESNKLDDPSXPALSRIFHLIMAPIPYRYLIPILYVSVELVKALQAHIINWDIHMFDEEIGNTTQVRTXNLNEELGQVHTILSDKTGTLTCNQMDFLKCSIAGVSYGVGSSEVELAAAKQMASGADDQXYPYTRXYGKRTMRIKSSWXKELPLVLATTXKPSIKGFSFEDDRLMQGNWTKEPNSSTILLFFRILALCHTAIPEINEATGSIAYEAESPDEGAFLVAAREFGFEFFKRTQSSVFVREKHTSSKVERLHIREFKILNLLEFNSKRKRMTVILQ

SEQ ID NO: 22691 - protein, 162 aa, Zea mays
  unsure (1)..(162): unsure at all Xaa locations
XARPSCRRRIIFDRLAKNGRMYEVDTTRHLNEYGEAGLRTLALSYRVLDESEYSSWNAEFLKAKTSIGPDRELQLERVSELIERELILVGATAVEDKLQKGVPQCIDRLAQAGLKIWVLTGDKMETAINIGYACSLLRQGMKQXCLSIPTGEQVAQDAKKLQ

SEQ ID NO: 22692 - protein, 165 aa, Zea mays
  unsure (1)..(165): unsure at all Xaa locations
LQDEDGQILLLCKGADRXXDLYHFLIFFGDALCSIIFDRLAKNGRMYEGDTTKHLNEYGEAGLRTLALSYRVLDESEYSSWNAEFLKAKTSIGPDRELQLERVSELIERELILVGATAVEDKLQKGVPQCIDRLAHAGLKIWVLTGVKMGTAINIGYACSLLRQX

SEQ ID NO: 22693 - protein, 174 aa, Zea mays
  unsure (1)..(174): unsure at all Xaa locations
FISLLPSSLFXQFRRVANLYFLMISIMSTTPISPVHPVTNVVPLSLVLLVSLIKEAFEDWKRFQNDMSINNAHVDVLQGQCWESTPWKRLQVGDIVRIKQDGYFPADLLFLSSTNPDGVCYIETANLDGETNLKIRKALEKTWDYVIPEKASEFKGLIVLIKAXNGFFIFTCGC

SEQ ID NO: 22694 - protein, 151 aa, Zea mays
  unsure (1)..(151): unsure at all Xaa locations
LPVCVVIVAXMAKEGVEDWRRKQQDHELNNRIVKVHRGSGHFEETKWKNIKVGDVIKLEKDNFFPADMILLSSSYPDGICYVETMNLDGETNLKIKQALEVTLDLQEDTKFREVRQTIKCEDPNANLYSFVGSMEWRGQQYPLLPCFILER

SEQ ID NO: 22695 - protein, 704 aa, Entamoeba dispar
MEKAWDFLQKKLFLRKKPEQPRTIIIPITKQNKKFCSNKVENNRYTYLNYIPKCLFNQFKYFYNLYFLITALSQFVPILQVGYRFTYTMPLAFVVILAMAKDAYDDIRIRIRDKQTNSQPFTQLIGGEPKEVQSKDIVVGNILKLKKDERVPADCLILRSTEESGSIFIRTDQLDGETDWKLRRAIGETQKMDIQTICNCQFELNVEAPHADVYSFQGTIKINEDPKLYSLNVENTAWANTIVASDEMCALVIYTGNDTRLARNRKQNGNVKRGKTEDEVNFLSKILFCSLMGLSILMIIPDLIQHPNWFILVSLTRFMILFSSIIPISMRVNLDIAKMVYAFFINKDKDIAGAEVRNSTLPEELGRVDFVLSDKTGTLTKNEMTFQVLCMQSETIRSTNFDDIKDDIRECLQNNGEKVLFKKKKNPKFIMRCVQAMALCHNVTPSFNENGEKYYQASSPDEVALVKFAESVGVVLEERTFKKIVLNMPMIGSIEYEILNVFPFSSSTKRMGIIVRNNKDNEIYLMKGADNVMAKIIKDNEWLSEECNNLAREGLRTLVFGSRKMSQEEYQEFNERYDHANTLMIGREEEVLKVQESIEHGLNAMCITGVEDELQEDVQKTLEMLKQANVRVWMLTGDKVETATCIAKSTKLVDIDQEIVQFFASSIDEATRLIFNNEGSIGTKALIVDGNTLSLMLKEMSKEF

SEQ ID NO: 22696 - protein, 1258 aa, Schizosaccharomyces pombe; identical to SEQ ID NO: 621

SEQ ID NO: 22697 - protein, 1305 aa, Ajellomyces capsulatus
MLPNQGHRCHTMRLLKADSQRRLRDRALELGQVTFLGQVKHTNRIHRLQIYTTTSDIQMTLNDFDDTRSAQGYYNDQNDMDGAIPVRDARARDRNSILSLGGGLVGRAKNMLGMKSPYSEMDLPLTETGARSAGVDTVGADDDGGSSSRLKEKKFSASDFKFGFGRRKIDPSTLGPRVILFNNSPANAANRYVDNHISTAKYNVFTFVPKFLFEQFSKYANLFFLFSAALQQIPNISPTNRYTTIAPLAVVLLVSAIKELVGDWKRKTSDKSLNYSRAQVLKGSTFEDTKWINVAVGDIVKVESEQPFPADLVLLASSEPEGLCYIETANLDGETNLKIKQAIPETADLVSPSQLGRLTGRIKSEQPNSSLYTYEATLTLQAGGGEKELALNPDQLLLRGATLRNTPWIHGLVVFTGHETKLMRNATATPIKRTAVERMVNLQILMLVGILLILSLISSIGHLVVRMKSADELIYLYIGNVNAAQQFFSDIFTYWVLYSNLVPISLFVTIEIVKYYHAFLINSDLDIYYDKTDTSATCRTSSLVEELGQIEYIFSDKTGTLTCNMMEFKQCSIGGLQYAEVVSEDRRVVDGDDSEMGMYDFNQLVEHLTSHPTRTAIHHFLCLLATCHTVIPERKAEKPDVIKYQAASPDEGALVEGAVMMGYRFTNRRPKSVIISANGQEQEFELLAVCEFNSTRKRMSTIFRCPDGKIRIYCKGADTVILERLHADNPTVDVTLQHLEEYASDGLRTLCLAMREVPEEEFSQWYQIYDKAATTATGNRAEELDKRLEIIEKDFFLLGATAIEDKLQDGVPDTIHTLQTAGIKVWVLTGDRQETAINIGMSCKLISEDMALLIVNEESALATKDNLSKKLQQVQSQAGSPDSETLALIIDGKSLTYALEKDMEKIFLDLAVMCKAVICCRVSPLQKALVVKLQRHLKALLLAIGDGANDVSMIQAAHVGVGISGVEGLQAARSADVAIAQFRFLRKLLLVHGAWSYQRISKVILYSFYKNIALYMTQFWYSFQNSFSGQVIYESWTLSFYNVFFTVMPPFAMGIFDQFISARLLDRYPQLYQLGQKGVFFKMHSFWSWIGNGFYHSLIAYFLSQAIFLWDLPLANGKLAGHWFWGTALYTAVLATVLGKAALVTNIWTKYTFIAIPGSMIIRMGFLPVYGFSAPRIGAGFSTEYEGIIPNLFQSLVFWLMAIVLPVVCLVRDFAWKYIKRMYFPQAYHHVQEIQKYNVQDYRPRMEQFQKAIRKVRQVQRNRKQRGYAFSQADEGGQMRVVNAYDTTRSRGRYGEMASSRPLDI

SEQ ID NO: 22698 - protein, 1360 aa, Neurospora crassa
MAAGRPPPGAPSSAQHDDLLLDFGNEQPYYGGGQRSTLNDDDLLRLHSDDAQGAAQPRPSVSYDDFVGSGQTTQPTATRPIQPAPGATGGGGPISPYPDSRSLDRHFSQTSDLGNYQRYAEDSDDYPDESTTSYYQHGGAIPPDSAAARDSARARNSVLSMGGGLIGRAKNMLGMGPEGYSEMDLPLTDPRATARVDHSHEPPPPQKPAKKFDFKFGFGGGKPDPATLGPRIIHLNNPPANSLNKYVDNHVSTAKYNFATFLPKFLFEQFSKFANIFFLFTAGLQQIPGLSPTNRYTTIGPLAVVLLVSAGKEMVEDYRRKQADKALNMSKARILRGSTFEETKWINVSVGDIIRVESEESFPADLVLLASSEPEGLCYIETANLDGETNLKIKQALPETSSMVSSSELSRLGGRIRSEQPNSSLYTYEATLTMQAGGGEKELPLNPEQLLLRGATLRNTPWVHGVVVFTGHETKLMRNATAAPIKRTKVERQLNTLVLFLVGILLIFSVVSTVGDLIQRKVEGEEGLAYLFLDPMNGASAVARIFIKDMVTYWVLFSALVPISLFVTIEMVKYWHGILINDDLDMYYDVNDTPANCRTSSLVEELGMVEFVFSDKTGTLTCNMMEYRQCSIAGIMYADKVPEDRIPSGEDGEDGIHDFKQLQKNLESHQSAQVIDQFLTLLAICHTVIPEQAEDGSIKYQAASPDEGALVDGAVQMGYRFVARKPRAVIIEANGQQLEYELLAVCEFNSTRKRMSTIYRCPDGKVRCYCKGADTVILERLNDQNPHVDATLRHLEEYASEGLRTLCLAMREIPEHEFQEWMKVYETAQTTIGGNRADELDKAAELIEHDFYLLGATAIEDRLQDGVPETIHTLQEAGIKVWVLTGDRQETAINIGMSCKLLSEDMMLLIVNEESAEATRDNLQKKLDAIRNQGDATIEMETLALVIDGKSLTYALEKDMEKLFLDLAIMCKAVICCRVSPLQKALVVKLVKKYQKESILLAIGDGANDVSMIQAAHIGVGISGMEGLQAARSADVSIAQFRYLRKLLLVHGAWSYHRVSKTILFSFYKNICLYLTQFWYTFQNVFSGEVIYESWTLSFYNVFFTVLPPLALGILDQFVSARLLDRYPQLYNLGQRNTFFKIRVFGEWIINAVYHSIILYVGGCLFWLNDGPQGDGFPGGKWVWGTAMYGAVLLTVLGKAALVTNNWTKYHVIAIPGSMAFWILFVAVYGEVAPKLNISVEYFGVIPRLFTSPIFWIQMPTLAILCLLRDFAWKFSKRLWRPEAYHHVQEIQKYNIQDYRPRMEQFQKAIRKVRQVQRMRKQRGYAFSQADESQTRVLQAYDTTQHRGRYGEMASSRPNQ

SEQ ID NO: 22699 - protein, 1156 aa, Leishmania donovani
MRQIRYRALHNGADEDARSRNSSTPNISTSSAHGPQLPQRHCCRPRDFVFDDSLSTGAAVSVLAIPQQKKHSVRRWLQEMLHLPIAPSLDNRQIPFGYFPGEWSPVGYPSNAVSNRRYTLSTFLPLALLRQFQNFFNLFYLFLAFSQVIPVLKVGFIFTYFSPLVMVVCLSLMKDALDEWKRFRRDRIANVEVFEKLTGGGDVVTVRSSHIRVGDLLILHQDQRVPADCVVLHTSEKSGTTFIRTDQLDGETDWKLRYPLNSTKGLGYAELGACASTCTVARLTKTSTASPAPSNWPTDRASRSRWRMPSGRRVWWRRGRWWLPSYTRVGRRAALNSTSPRNKLGLIERELNLIAVLCFALLLILSFLLVAQQQFRGDFAVMFVRFFILLSSMIPISMRVNVDVGRLWYSYDMSHDPNIPGAVARNANLPEELGRLRYLFSDKTGTLTKNKMKFRVMQVGPDTVLTDRFTDQLAGALQEYFGTGNWGAGARLMLSNVSARVSVRNSKQWSRDVQRVGDLIRAIVLCHNVSPVVMEEPLALGTDDETTALGRGAAAAVPATTDMRSQPTDYQASSPDEVALVKFCGSLGIVLTYRDLTTIAFTVGGGAQLHTCTIVKTFPFSSERKCMGIILRERTGSCSGGSSQETVKFYMKGADVKMASVVRQSEWLEECCQELAQMGLRTLVFASRTLSEEMLGAFLQQYEAAISILGEGRAAAIEAAMKLLETDMTLTGVTGVEDELQDDVVVCLETLGMCGIKVWMLTGDKVETAITIGRSTRLIPRHCRIEYLCGMAPADIGHRLHELQEEFCWGVTCGSIVPPWTLVLDGNALAYCLSHASFFADVARTAYSVIVARCSPTQKAAVVTVMRDSCRDARVAAIGDGGNDVSMIQAANVGIGIEGLEGKQASMAADFSITKFSHCLRLIMWHGRNSYQRTCRLSQFIMHRGIVYSVVQTVFSVLFAGTTMSVFNGYLLMGYSTVFTMAPAFALVLDEDFNESDVHEYPFLYKDLLKARSMNTRTFLQWVWASFFQGGVMMLMALQLFKSDMFQIVTIAYTSLLITELAIVGATAHLRILWRERRARFFLFLCSEVVSLLMFFLAVVVLPDTFDRDFFFSWSCWWRVAVICLASIAPLMIFQMVGKYILFNPRIAVSCMGCRT

SEQ ID NO: 22700 - protein, 387 aa, Trypanosoma cruzi
DKTGTLTENAMKFKMGDIKGHLIYNENHSFSLELLQRQGVIRTAAEEYFLALAICHTIQPFPDADAPLGVVYEGGSPDEVALVTTAAEHGFRLLERNSRCLTVEVEGERRVYDILATLEFTPERKMMSIIVQERNTERIILFTKGADSSVGSRTADEEDVQEYMQILSQSLLDMAEHGLRTLLIATRDLTSEMFSEWNTRFLAAGKVLVRRNEAVDRLCGEIEQELRLLGATAIEDKLQEEVPETVSFFREAGVMMWMLTGDKRETAVTIAATSSLLDPRRDYVVHVDLGSLDPKDPEAIEKIGADLHQVELHLESGRREGVRCTLVIDGTSLGVVMEHYFELFVRLSKCVSSAVCCRLTPLQKAEIVRMFQKSTGFTALAIGDGAN

SEQ ID NO: 22701 - protein, 393 aa, Trichomonas vaginalis
DKTGTLTRNITEFTKCSIAGRKYGHGTTEVPMRLQMPVGIPCEKPDPTGKVFKDDQFMQLLNGNTPMEIKHFLWILSVCHAVIPEPNEKKPYGIAFQASSPDEGALVSAAADFGYLFKARKPGSVTVRHNDVDVEVEVLAVLEFTSERKPSSVIIRHPETNEIVLYCKGADDLIMARLAKDSLYVDVTQQHLKDFAADGLRTLCAAYKVIDPQWFEGWAKRYNDACCKLEGREQAVDEVANEVECALQLLGATAVEDKLQIGVPEAIDSLLKAGIKVWVITGDKRETAINIGFACSLLSTDMKLTILDSNDSQEIINELNKGLQETGPVALVASGAALYHALLPENQPLFFQFASICQSVVCCRVSPLQKATVVSMVRKQTGALTLAIGDGAN

SEQ ID NO: 22702 - protein, 356 aa, Trichomonas vaginalis
DKTGTLTENKMNLVSFVDHSGVHSQYFSQFSAEDKEKSADMLLSFVLNNSVIVYNSPNGIEYNAESPDEAAGVKFASECNWVLKARNPARIAIEVNGVYQVYDIIAVFPFNSTRKRMTVVVRKQGEEGLLVLTKGADNIIYPTCREVYFRQELNDYAISGYRTLVFAMKELYGEEKQKFMENLNKITLSMDKVDEKLLEFAESVEQDLECIGIAAIVDKLQEGVPETIEWLRRAGIHVWVLTGDKLETAIEIGKTSKVIPHGSDVLIVGNSDKIVTSLDLGRYIDEFDNFNDPVLVITEEVLEFCLSNQSYLFFKLAMKCKSVIFSRVSPYMKAKIVNLVRTRNNAITLAIGDGAN

SEQ ID NO: 22703 - protein, 283 aa, Trichomonas vaginalis
DKTGTLTARVPDESMTIDLGGTETKFEHLATIEFDSDRKRMSVVVRAPNGEVVISRKVPIRSMFPLIAKDEDESVINLRKSSRSICRRRPQNPYYAWRLMPKDEFEQFMAEYREANLAMTDRDKKVKEVGAKIEKDLVLLGAVAIEDQLQPNVPETMSYLSMMGIKLWVLTGDKHETAVSIAKSTDVITPEWQKSSKFYRRPFRNSRQSQDKSMNVHLHAFFVLSPDALIYTTEQVPLELVKMGDQCRSVVCFRMSPFLKSKVVDVMRSNTKKVCLAIGDGAN

SEQ ID NO: 22704 - protein, 1057 aa, Entamoeba histolytica
MNKAWDFLQKKIPFLRKKPEQPRTIIIPITKQNKKFCSNKVENNRYTYLNYIPKCLFNQFKYFYNLYFLITALSQFVPILQVGYRFTYTMPLAFVVILAMAKDAYDDIRIRIRDKQTNSQPFTQLIGGEPKEIQSKDIVVGNILKLKKDERVPADCLILRSTEESGSIFIRTDQLDGETDWKLRRAIGETQKMDIQTICNSQFELNVEAPHADVYSFQGTIRINEDPKIYSLNVENTAWANTIVASDEMCALVIYTGNDTRLARNRKQSGNVKRGKTEDEVNFLSKILFCSLMGLSILMIMPDLIQHPNWFILVSLTRFMILFSSIIPISMRVNLDIAKMVYAFFINRDKDIAGAEVRNSTLPEELGRVDFVLSDKTGTLTKNEMTFQVLCMQSETIRSTNFDDIKDDIRECLQSNEEKVLFKKKKNPKFIMRCVQAMALCHNVTPSFNENGEKYYQASSPDEVALVKFAESVGVVLEERTFKKIVLNMPMIGNVEYEILNVFPFSSSTKRMGIIVRNNKDNEIYLLMKGADNVMSKIIKDNEWLSEECNNLAREGLRTLVFGSRKMSQEEYQAFNERYDHANTLMTGREEEVLKVQESIEHGLNAMCITGVEDELQEDVQKTLEMLKQANVRVWMLTGDKVETATCIAKSTKLVDIDQEIIQFFANSIDEATSLIFNNEGSIGTKALIVDGNTLSLMLKEMSKEFIQFALKAQAVVCCRCLPSQKADIVRLVKSSGLTTCAIGDGGNDVSMIQEADVGLGIEGKEGKQASMAADFSIKQFSHMLKLLLWHGRNSYIRTSDLALFIMHRGMIISIMQAVFSMVFYFTPITLFTGILLVGYSTFYTMAPVFSLVLDERISLKDIMQFPVLYAEMQKGQNLSFKTFSAWMFISILQGSVIMMLAMILFDSSFVHIVSISFTVLILIELLNIGFTIRRWNWIIFASEASSVLMYLISIIVLRPTFEPSFVFSLGFWWRVAVITLINSFPFILKFIYELLNPPKHMTVGHKKFPISFDLTCCCNCHNIRKKNDYQDINFSEIYDKTETNDDSTKALIDHLN

SEQ ID NO: 22705 - protein, 1553 aa, Plasmodium falciparum
MSLVYRKTLNFLKGKNEDDKDVKININGENKRTCNNSVITSKYTVFNFIFLNMYEQFHKISNVYFFFIGILQVIPQFTATNGIPTVFFPLLIVLTANAIKDAFEDWNRHKTDKIENNRMCYGIVSEEEKKIYQEKSNKKNIFKKLKRYFFGNRKICNTENYYDEDDMCDDEITDINDYINNYEDNLENIEGTVKKRWKDIKAGDIILCRRSEFFCADILLLCTSHKNGIAFVETSSLDGETNLKVKEANTFLFNILGNDRNSAIDNVKNLKGFILSDKPNKDLSTMYGTIYFEKDKKIDVENIGIQELLKKTTEEIEYRKKRLSSVDLSKSSSAIGSNLCNNNNKSDSKSDIKNYNKDDDDFDDMDENNILKNDNYIRIPFDEKQFVLRGCKLKNTDWIMGIVIYVGRETKIQMNSSKSIKKTSKLEILTNKMTIIIWVIQMIICLISAYYNAIIVSSSRKNRFRYLPFNLEKAKKPYIVGIISFFSWVVITGNFVPISLIVTMSFVKVVQAYFISCDKNMIHKVQADVPSFGEQKEIPNIPKDDISSDADVIKRMRTKKIADSSLLHIDENQTEEDNMDMKSDCIAFKNNSSHQNINGNNKQYSSSSLGIISNAPKREISSRVISFKDSKEKNYIYFNAVPRTSSLIEELGQIEYIFSDKTGTLTCNIMEFRKCAINGISYGKGLTEIKRNILKKKNLEIPVEPTMKFKKKTPHVNIIDNDIINHLKDPNHFNHVNLINFFLHLAINHAVICEKDKEGVTTYSSSSPDEEALVNAAKHFDITFLYRREGKYGISIFGKIYEIDTLATIEFTSKRKMSSVICRIPVINPDYNHPTDAKSSNMDKKKNNMDDHLVVGKNEEKEETDDLNVYPPKKEAHSKLNNNNNNNNNIRIDNLYDDKNNFNIIYNHNEGRTPEVITCKNSKNSKIMLFCKGAGSIILKKLAKRTDIDEITIEHMETYADEGLRTLCIAQRELSEESFAEWYHLYKEASLSIKDREEKLESVAEYIENDLILQGITGIEDKLQEGVSSTIEDLRMAGIHIWMLTGDKIETAMNIGIAANLIDNYSEQFIYTEEYIESEEALIKKIDDDILMVEKSLNIPHYNFDDENNNVEDEKRKTFFRNNFIKNFFCAKNKSGLLLNPDKYNMLINTLNYVLVVDGSVIDLLLSEKMERKFFYLADKCSSVICGRVSPYQKGAIVSSANRLLNKITLAIGDGANDRNMINTANIGIGIRGQEGVQAFNSSDYGISQFRFLKNLLLVHGRLSYRRISKLVVYMFYKNMVLIFPLFIFGSISLYSGQKIYFEFLLHLFNVLFTAIPVVIHAVLDQDISLNTAMEKPNLYKLGIHHYYFNIRTFISWVMNSLFHGSVVFLIPLYFLSYYNIPTSDGIPYDIWTVGCATYFLTVLIVNFKILFETYYLNILPISGIALSIFSFVLLVTAFSFMCVGSIHLLGTIVYLVQSLRFWLVVILGLFTALLRDYVFKVYKRNFNPEIYHLLLDQENAKIGMNDVIDQLKLNEFDKDDDIRIEKSKSLGYAFSEADPACIQLIRKQDNMI

SEQ ID NO: 22706 - protein, 1501 aa, Plasmodium falciparum
MYEQFHKISNVYFFFIGILQVIPQFTATNGIPTVFFPLLIVLTANAIKDAFEDWNRHKTDKIENNRMCYGIVSEEEKKIYQEKSNKKNIFKKLKRYFFGNRKICNTENYYDEDDMCDDEITDINDYINNYEDNLENIEGTVKKRWKDIKAGDIILCRRSEFFCADILLLCTSHKNGIAFVETSSLDGETNLKVKEANTFLFNILGNDRNSAIDNVKNLKGFILSDKPNKDLSTMYGTIYFEKDKKIDVENIGIQELLKKTTEEIEYRKKRLSSVDLSKSSSAIGSNLCNNNNKSDSKSDIKNYNKDDDDFDDMDENNILKNDNYIRIPFDEKQFVLRGCKLKNTDWIMGIVIYVGRETKIQMNSSKSIKKTSKLEILTNKMTIIIWVIQMIICLISAYYNAIIVSSSRKNRFRYLPFNLEKAKKPYIVGIISFFSWVVITGNFVPISLIVTMSFVKVVQAYFISCDKNMIHKVQADVPSFGEQKEIPNIPKDDISSDADVIKRMRTKKIADSSLLHIDENQTEEDNMDMKSDCIAFKNNSSHQNINGNNKQYSSSSLGIISNAPKREISSRVISFKDSKEKNYIYFNAVPRTSSLIEELGQIEYIFSDKTGTLTCNIMEFRKCAINGISYGKGLTEIKRNILKKKNLEIPVEPTMKFKKKTPHVNIIDNDIINHLKDPNHFNHVNLINFFLHLAINHAVICEKDKEGVTTYSSSSPDEEALVNAAKHFDITFLYRREGKYGISIFGKIYEIDTLATIEFTSKRKMSSVICRIPVINPDYNHPTDAKSSNMDKKKNNMDDHLVVGKNEEKEETDDLNVYPPKKEAHSKLNNNNNNNNNIRIDNLYDDKNNFNIIYNHNEGRTPEVITCKNSKNSKIMLFCKGAGSIILKKLAKRTDIDEITIEHMETYADEGLRTLCIAQRELSEESFAEWYHLYKEASLSIKDREEKLESVAEYIENDLILQGITGIEDKLQEGVSSTIEDLRMAGIHIWMLTGDKIETAMNIGIAANLIDNYSEQFIYTEEYIESEEALIKKIDDDILMVEKSLNIPHYNFDDENNNVEDEKRKTFFRNNFIKNFFCAKNKSGLLLNPDKYNMLINTLNYVLVVDGSVIDLLLSEKMERKFFYLADKCSSVICGRVSPYQKGAIVSSANRLLNKITLAIGDGANDRNMINTANIGIGIRGQEGVQAFNSSDYGISQFRFLKNLLLVHGRLSYRRISKLVVYMFYKNMVLIFPLFIFGSISLYSGQKIYFEFLLHLFNVLFTAIPVVIHAVLDQDISLNTAMEKPNLYKLGIHHYYFNIRTFISWVMNSLFHGSVVFLIPLYFLSYYNIPTSDGIPYDIWTVGCATYFLTVLIVNFKILFETYYLNILPISGIALSIFSFVLLVTAFSFMCVGSIHLLGTIVYLVQSLRFWLVVILGLFTALLRDYVFKVYKRNFNPEIYHLLLDQENAKIGMNDVIDQLKLNEFDKDDDIRIEKSKSLGYAFSEADPACIQLIRKQDNMI

SEQ ID NO: 22707 - protein, 4226 aa, Plasmodium falciparum
MSDSKKHYNESNVRYKVKYSGKIFGNNMKKLNENNNHDFTTAEAAWMEKKKKLYKDTNNQPLWDFRKIQINPTETDELISFPSNKICSKNYGKYSFIFKGLYEQFLRLPNIWFLLISLLEFIPQYQNLSNYMYYSKHSSFFLLLFFICVSIIKNIYEDSRRSNIDYQINNRLCHMLDGPNSQLKAVRWMELSVGSIIRLIENEQVHADILLLSCNNSEGVVYIETSLLNGETNLNKKYCVNETRNETSIYAISNIRGRIVCEKPNSNMESFNGSLKLDAHPRATSLSITNVIFKGSHSKNTEYIFGVILYTGNDTKIMKNISNNKHKLGYVNKELNSYTIIGLIFTFICVFISVLFKWTEDDKFRNGSHFFLITVKDNICESIVKYTLLYSNIIPISILISVDLISILQSILIENDNHISTFENYETSEPSTIDDMDNELGDFKMDKSHTFFKKYTYFLNNRSKNFTNNRYSSTNTERASDFRKSFFGTFDKLKTIKRYFYSIKSKIKSISQSNTLYNKSSAGGSIIRSDKNKQSTFSKSFIDIFQRTNNNEHSQTLDNNNTNDNNNNNNICKEKYQNVNNSKNVYVSEDSSNNKYKQNDYLQKSQEQNEIHSINNNNYNNKNDNNLQTEFSNHNFRINAYKTNRTTKDDTYNNKHISLNSRSKSNQKGILINSNEINRKKKKNLLQKIFPFFKKKRTNISEDLSKYVFRRSKQLNINHNNSEKYNLNDYDEYGWGLCLNSNMHGDLGNVDFIFTDKTGTLTNNNMTFNMCSIAGKTYGSKCKNKKKIYNNPKSNNDNKLNSYDKNIFKNKFSSEASIKKISNVRDFSNNVSSKNDLTLDDPTELISDEGNNYLRDKYEHTSDKKNDTNKNRDGANNSNNNNNKDVSNNKNKNNNNYNYNSNNDYIKQNGECNIYNNQNNTNNTHNNNIYYDEYNNTNEGNMKNTNVNKDTNSKCNKKDFIINTSDIINNNNNNNNDQKTNNLKYKSSSSWNSKAKKSSYINLNSYNKYQSFQNSSMLSSSLSSTCSSETEDENGSQLMYYSSSNYDNLDINNDMDSTKTYSHYTEQNYYNSVKDDKDINSEHQRYQQKKTNKQTKNIQQNQCDQWEDNRYTQESIKNQYFFDRNYQTFLMKQNFPRPKSFRLNMNSSSVKGRCDFNDTKIYNDLNSQSWRGYYIDEFFKCMTLCHAVTPFIQFDYIRNKHLTYTNSRSSKGISNNMDRYNINPTTTTTNNNNNNNNINNINNINNNNNNNNNNNNNKQFSCDYMKNRNDIIFETSTDYYANQDNAKRKREKTLFDNVSHCGEIQEYRDNKKYRMKRSQTCSNNRKIFSNQRTLYDYRNMNNNLKNKNSYLRNKLKSKIFLDKSYRKRKKSSGTYKGSDICKGIEKKETRRWKRFLHMKGSNNRNIFSRIKDFKSNSIIYNNQDKTNDYKNGYSNNINNNNSNNYTNEKINRSFNKRHSAVSFKQMSKEKLIPINNVLSNRCDVESYPNEELSFSKKKKKNSEIVSFASGKSDIGFEERTDAGIAGKNMELSYNELEKYKYVKHIDSNNKYINNNNNSIHMSHMSSNNNTFESHIYFDAIKYQSSSLDEECLIYSSSFLGYRLVLRNKNTMCIEIDGSFNKWTIIGVNEFTNRRGKMSIVVKPDSMESGSILYVKGSDSSILSLLNLKYSKFLDKKYSRKRRNKNIQKYKQKREEYNELKSKDINIEEFQKSKSLSLKNFKNNTPKVLFGECTLDNNNNNINKNYKYDKNDKHNNNNNNNNNNSNYSYNYLHDSNNLDAMQNQKYSYAYEDKEDYYYTNNGECNKYKERYRRLEKQLRKFSVKGLRSMIFAFRYLSEEETIKYKRMYDDACSSIYNKEQRLEKVAEEFERDLIYLGITGVKNGLQEKVPKTIDILNQSGIRIWMLTGDNVEYSLHVSFLCKFLNKHTKIFHAALENSNAKKLKREGMALYELFQLEKEEKKPYENLCLLVNGRNLQTFLNYTDLQTHFLNMACTCDVVIACRITAKQKAFLVQLIKNRLYPTPNTLAIGDGANDIAMIQEANIGVSIMTSDCIISAGYSDYCIKKFCYLRKLLFIYGSKHLYTISIILYWNFFKNILLILPIFFYQAYASWSCVKIYPELLYTFFSIFWVFIPIIYYMFLQHNLNYDILYNIPLFYALSRRRYNMNCFKFLPWIFEAIFYSMIIYFFAYAALKENSHLNNGEVITINTFGNICFIGCLLISILRLFLEGSLWSPSILITCFGCFLFVFFPSLLFICFAYLSNEYLREVFRQTFLWAPLYVLLILWFSTCIISYIFINFTKSILFPNIYNVVNHWLFEQYQEKHNKNKYIFSLSGKNKFLKLRKLGKKIKFKFKRNYSKKYDTNVIREHPLLHHTFKSEQDQNKCNEQFSKDPFISNSLLKSKNCKFKKDSSYSKSNIHVDEEQTYKGLKVVLSEQVVHAKENLVSFKNEKKNKNNKNTSMNVNDNIIIKNNNINIKNNDNNNDDNDNDNNNNNNNNDNYNNNDHNKKEFKQKHIQNNYENLFNHTQVENNLIKENLSIRNDNNRRDNKNETDYIKQSDEDYEMNPSITSLRKRECINDSKYIDNKSYDNKISNNHEEKDGFKSDDRSLINSNMMDYKNEFTENDTTYSFNDSHMFYDFPSNSKTTKDYKVINSRIDDSIMADMKNCLNPLKNTFLVDLLPPGKRFRINEDHIYFKNNERMENIPEALDVNKKYYHIIQNKAEYYDNDSLSEFSYTSSNSSINNKKKNENTQKEIVKVSHLINRFTLAFKDMQLESGFQIHKKNKFYKTFTPWYRFIFLLLGVFFLYVWKLESSLSQLWNMPSDASTDVFILFLSLLLELVLLAATVTTFFSNIFIENFNKIISAVVILIITYHVVSYSVTHIDGVFQAVLFPLYTFVILRLPFVNAVLCNIIFLGLFIIRFNGDHFLDKKGLAHYIPLFIGVDVFVGFVGYRLEYNQRKNFLLEYSVESSRRKQREILNTMLPPFVVDEMIYSELNEEGIPISLKAEDISTVTTIFCDIYDFQNIVASIEPTRLVEVLDRLFLCFDKCTEQFNCTKIETVFETYLAACGLVKREKDEDELENNKYSNNNKNNNNNYYYNRKKKKKKNNNNNNNNNNNNNNNNNNNNNLNNNNNNNNVNTSDDDGDFFEEDDANNHQIYNQMKGQEDAHDSIDFALSILHVSSHIKYEKSKMMLKKNDSFEDANDDTHNVNDSFNNDKAENDNTNTDNNKPTRIRVKVGIHSGRIIAGVVGSKKPQYALFGDTVNTASRMKTTGKPDYIHISEATYNLVKDDKTLIYEKKETEIKGKGIMTTYLLTSVIGLNYPFLGEHVEKKGHFISELYEDDLSNNLNYDKTQNILGYYSNKINQNNDSNINEGIINNNMNTFNTIDGDTSNYYVNLKDLSLNDLPNEYIKDVNTHYCEIIKLRNLKIGTAVGYQLKQKDFYNMTFLNNGLNNDTATNFNQYIESHKDFDDIKDLRIGMNKLSISDSLYYLNENVIRNEPINEYKNKIKINSVNTNKKSYEDAHLNAGNIIYTNNEYPNGQNIEEDDDLLLTNHYNKTNVNNNNNNNIYDVSKELIEHNKEDYKNILMCPKRCKNCNETYCTPNDCNNNDHVYHVMYHRKLSNIKKNYLKNIRKDANIKKDIEKEELNKIHSNKKSFNFFYLFSYIFKIFPFIGKINKEEKKNKSYKKGEQDKSSKRIIALNSEWIFLKFSDKNLEAKYRAHFYSNKSNINSIEQALIIFLVTFVMQTLISSTVYIVFIDHKRATQTLHINYFAYWSVRSVYTFFGFVLWLLFHYRTRPEVSSLLNIKWMIFFLNLLFISAACVFSIAYLWAISETDQTTSYTIWMTNDTIEFFFYLVILHHNTGMLFQTCILVDLLFITMSLTFIATSVVKTITTDSTVLLIPWYVAFNLISTYCKESIDRRTFYANESAKKTENRATELLNDMLPKHVLEEFQQDKLKLAYTHDRLTFLFADICGFTSWANGVDASEVLTLLQKLFAKFDNDSTKYGLYKLCTIGDAYVAISEPVTEDNKDYDPVDGTERVLEMAYSMIRIIKEIREKLYIPNLNMRIGLHYGSCVGGVIGSGRLRYDLWGIDVLTGNLMESNGIPGKINVSETLKNFLLQQFKNRFIFKPHTTIRVIYKDVKCFIITDKKEVESSNHSKLLQNKNYLLNKKFSTQNYLVKNIFAKKKHSSISSSKNIHSYDEKKKKKNDLFYINVNDRQSNL

SEQ ID NO: 22708 - protein, 509 aa, Plasmodium falciparum
NSSKSIKKTSKLEILTNKMTIIIWVIQMIICLISAYYNAIIVSSSRKNRFRYLPFNLEKAKKPYIVGIISFFSWVVITGNFVPISLIVTMSFVKVVQAYFISCDKNMIHKVQADVPSFGEQKEIPNIPKDDISSDADVIKRMRTKKIADSSLLHIDENQTEEDNMDMKSDCIAFKNNSSHQNINGNNKQYSSSSLGIISNAPKREISSRVISFKDSKEKNYIYFNAVPRTSSLIEELGQIEYIFSDKTGTLTCNIMEFRKCAINGISYGKGLTEIKRNILKKKNLEIPVEPTMKFKKKTPHVNIIDNDIINHLKDPNHFNHVNLINFFLHLAINHAVICEKDKEGVTTYSSSSPDEEALVNAAKHFDITFLYRREGKYGISIFGKIYEIDTLATIEFTSKRKMSSVICRIPVINPDYNHPTDAKSSNMDKKKNNMDDHLVVGKNEEKEETDDLNVYPPKKEAHSKLNNNNNNNIRIDNLYDDKNNFNIIYNHNEGRTPEVITCKNSKNS

SEQ ID NO: 22709 - protein, 3124 aa, Plasmodium falciparum
MKTQTLSLMNINGKRKFLGTNNKIYRKVIINPTSEDDIQKFCRNYFRIYNFSLYNFIRRLISFDAILVYSLFLTVYIFSEINHGETKKYLFIDTAISLFFNIILLIVIESLFELKKLKDVKNANSQYYLRIVPKMSYFEKVMTKDIKVGNIIRIFQGDEFPADVVILYVKNNANAIVDSFKIDGLFRKSIKYAVDKYKIDKDYLKMLSEINGVIRCELPNKNIFCFQGNFKLDKHPRSLLLNYENFALQSSVLKGAEYIDAVVVYTGADTKKNLNIPQKIEENKTFCIKMNNIVYYLIFMYFVFVVLSIVIKTIFFHKKNSFQNSRDSFLSMLEDFVGLYILVLPIMMYSEKSLIYIIQSLRIENDLRMRNTDSEKPKVFNKNKNDSLGNVDLLATSRNGVLVKRKELLVSCVINNVMYGKKDIICSRTNFKLPTLNILDSERKNVSNLLNLDERIFKDPENIFFPTRDFYSFLKLFENKISSIYNPYSSSLSNLLKEKYKNYVNEEILNKNVKLTSFVKSQLTIGYNQICEDDELSYNCYEIKEDSQKENIQSVKIEDFILGLCGCNRIIIYNEKSLDISMNEYKSDNFMETYSKFETENEEYHENDHDEYHNMEHSDDENINSIEYEDICLYNIIRNTGFSIYCYKNTLFLYNLMKECKVYFLTCYHDFLRSNKFSMCILKCGYSINNEKEGGILYVRGYDFNILPYISKEKNNIKKIKNVIKIYTLNYLKVIILCKKQISNEDIAKYIILKSISKKLSFKFYDLIKLFFLYDLEVIGIIGLKNQLREGVKETFNDVINFDIKSWIFANECSKDTYLTALQCNLIVSSSNLFLINYYNLKNTHEEGANILFHNFISSLYKLKSNSYAVVINDESIKNIMTNVESMKIFLCIAMRATVVLFCKLQNETKGKIIRTLYALTSPKLTVLGIGTTLNDAYLLKYSSISVFLSLNEHVNILYNISDYVLQEFKFISELLILGRLNRFSLCKVFLWIIYLKITVVSFYFFHNFDNYFSGSSASSILYTQTTFALLHYFLIIAFSAYEIDLPYKFVRRLPYIYQLSRRKYFLNNNIILLTIIEAILISLTSYYILRLNVFHLITHREFTFHIFILNVFITTEKILLLSKTWHIYFFIMAVLIIGILLIYVNIFTLVDCIKNGKCEFSLFQMENIYFWTSLFPILYINFIFDKLMKYIKNRIYPDISDYLRKYFLRRICCHNNDKFLSQRKIKGINKFVNFEKNDILLKYIPTPKIYKIKDDPTYYNKSKRSKFLYDTFRKVIDINVKYRNQQLNLEYKTYEKGNKLKLRIIVILLFLIYIIIFSSQTIIDINTKSNIHYITMFYIIYFVLACVLLIYIRIRNKATSTFFFFLSRFLLICGFCIELYDNISNDILNVLITYSFTVSYIFFMSFKILEALLVCISILLLTFGVYYEKNKNMIDICTHFCSNPYLSINNLDHMNISCLCKKQIVIFLISLLSFTLICLSMKYYEIFYLKKKFLFRYKQKVNLAKQIEILHTMLPNFLVEYLLISDPKNDGIMVGKNISGEDRGIISVIFCDIDDFQNMVSTLQPHVLVETLDNLYLYFDKCIKYFNCIKIETVFESYLAASGLSEKKNNALDKIMYDTKCAIKLAIAQLSAKYYISYKVLDTREHFSDNSTSYDKYINKNISLKIGIHTGKAISGVIGSVKPQYALFGDTVNTASRMKSTSLPDHIHVSYDTYKYLKEDNTFIWKERKVFIKGKGKMKTYLLVDILDDVKRKGESLNYYSSSNLLLSQLGSEAVSIYEEREDIKEGSMDIIKESSRDIIKEDSRDIIKEISTNISKSSSRNISKSSSRSISDIKEGQIIDKEDLIFKINRMKNKIDSRYSKRIDKESRDKISDKTNHVLDEVVKHSDIHLLNYEINNKRCKKMKGDTNNENKLIGDIFNMYDKKIKYIYKKNYKSKSMENISFIKHYRNTKYKKSDYLLLDNKGESKKFKRNTSYVLESPLHLIGDIVDNNIKRKKKKKEIKTIVSDDMFTSPVNIKEYNYNEQERKKEIVGNLSYDKTKKICPFIKFTKEGRIKKNKIEKKEKKEYNNNFLYNDDYSSYSSPKYGDNENNFVIKYIRERKDFQKKFDHPNFNFSKFLHNYNPMKNKNKNKKNNVNVRRNEYPNYTSSSKDGVSYNFLSDSLFSSDNEYSSDNEYSSDSEKYYKKRVKKNKKIIKFDDLFTKIYIEKKRLLQMNNYDVKGKGKKLKNKGMERNKTKYKNVNEITKMKYFVNNENRDHEVNKEDISKSMQKYFLHISKHKKEQIEDKKKTHKYFHKNVECVYPYAGNNINHNFSRNEKRKYSINLYDHLDEQEKIKGKKKYFNKDKELIGSINKQTERKPKKKNKKNIENKKDKKKIRMITNKTKEKHSNSIISVEEQNMNHNNSLKKKEVNFTGKNEEYLNRANTNCSLGIKEMEEDVYEFHSNNIYYNNQTSYSDDINNTTKLKGMGNNTNDISKNKGKNKLGKKISFFSMNNKYHESEIMNEEDNKNMLNLTQSQIINKDKYNYFTHCPSLKKKKSVFTKINNLFKNYFKSIDVHEKFGFSKKFKFHSKDSDDIKGNNNKISKNRYNNNNNNNNSNYSNIDSGKYSHNNKKNHHHNNNKYHHHNNNKYHHHNNNKYHHQNNNYEKHHHSNNSRVMLSKGEKTEKNENVDYAYQFDNYDKKLLKKLTSNLQLNKKNVKNFNMFYYKFNDEELEEEYTRNYYREIINIDLTKKLIIIFIFTEIFLSLCNIIELSFYEKKLRYNDSIVIIWLIRSIYLFIITYIWIILKTKLKEYKNNSSKMMWTIFILNIFLCSWGIILIDLSCIHYSMLLGNKNERALFFMKDASELIICIQLIFIKNMLFKHKFFFFVFFYIFLIYSFSKLFSIHTCQTHICCSIILFISINILYFWYSEYLDRIQFLVKRKRNRMEKISQDFLTKILPRQVLEEYQNDNLQLTYKHEKIAFLFADIVGFTKWSKTVSPKEVLKLLQKLISKIDKDTIKLGLYKLFTIGDAYVATSQPNSSITDESEALEGILNILKLAKLILHNINTIKIQFNKHDFNMRIGLHYGSCVGGIIGSVRIRYDMWGLDVLIANKIESNGIPGEIICSEQFRHFFIQNEPQA

SEQ ID NO: 22710 - protein, 990 aa, Encephalitozoon cuniculi
MNRKENKIVTSKYTAMTFLPLNIYHQLSRPSNLFFLLTLILLSIPSISPFSPFTYLLAFVVVVGASMMKDGVEDYRRHKQDKVINEKPANVVRGKGRDAYAEEIHVEDLSAGDLIFIMKDQEVPGDVVLLNSKVETRDGIRCKNYCFVETSNLDGEMNLKKKTSQHQVECKRKDTGLEFRGEKLSLCSCDRYYMDRTSDFTVEDTGDLFNKFECQINIDGENILCNEKNVLLRGSRIKNTECVLGMVVCVGKQTKLGKSHFKAKVKISLFEKSVGDFIFGIFMIYLGILAATSVLGARFLRKDDIEYLYLNEYLANDALKQTGTNYILFSYLIPLSLFVTLEVSRMFHSMFISYDDEMARDGIRSICRNSNITEDVGMIEYILTDKTGTLTKNSMVFKYCHIYDSPDLISREELKESCFDIDLVNDLSPAVKKRRSRMMFILALLCCNSIEPLNNSLEGISQDELCIVQELERLGHVLVERDEKFVVLEINGRRVKLDIMVSLDFTSARQRMSVVMKVLGRYILFCKGSDQKLLGDKKMTFEQGDMGMIRALINNNSEYRSLVVGYKELSSDVLAWIENQYNRVSLKNKFLEQERIFDSVEEGMVYLGATFIEDELQDDVRGTITSLRDAGIKIWMITGDKKETAMSCSEDCGITQKSREPQSLVIDGKEFLEKLGDPEIFEYKSIVIYRATPYHKGKIAEKIVESGKNTLSIGDGNNDVPMLTSSHVGVGIMGKEGTQASLSADFAIPEFRLLKRLILVHGRYNLIRFSKITLNAFFKNIFFISIQFMYNFFNGYSGKPIYSNFFLNYYNVLFTSFVPLSIGLFDKDKPEIYLMSHPGDYRDARRLFSRPSFVFGFVYTVLLGIVVFGLSVGVVYVKDLISRRGLVGGYVLLTNYFSIIVFWVVLFTQIREISFFVVYSWIAIGLSIALNFITLFFIQELDVTTNNAALNLFSLPVFHLTSLFVLSGALLVDFVVTRMFSVVKKSRGWP

SEQ ID NO: 22711 - protein, 1094 aa, Encephalitozoon cuniculi
MTDLMGRFRHISKERRRRYPPNIIRNQKYKWYTFIFAVLRLQFSHFFNTFLFLVCMTQLKKEYLVSSLVASVGPWAMVLLFSLFKEGVEDYKRYERDKITNSQLYTKLTSQGFVRVPSSRIEVGDLVLLEKNERVPADMALLKTSDVSGHVFVRTDQLDGETDWKLKLTIPRMQSATFDELRKLSILAEQPSKDIYSFTGKIKIGKFSLDELSEIEEEGNEDEGIGRRIERLLEFDFGREEGSVGASEGPKDVSWVYSSSSQSTGESGSLDEDLGFVSDGRDSAAAGSSEGLEVGNESNVGRETEEADVSLKDEEKPVAEALGCENMLWMNTVVATCSILGCVVYTGKDAKAMLNTSRPRNKIGKIELELNGYMKVLGAGCMVLAGIFTYMRGVGSRPDIIFIRFLVLFSSVIPISLRITVDWARYCYGKYISEDERIEGAMMRSNNLPEELGRVSYFLTDKTGTLTKNEMEMKKIHLGTICYTKELNREISKNLAKVLNGRNDGKGVFFRGKKDINARVYDLVQALSVCHNVTPVISENEVSYQASSPDEVAIVQWTECVGMKLYKRDRSMIVIRDPLNDEQEYQILYTFPFTSETKRMGIIVRYNEEVIFFLKGADVVMRGIVKVNDWVEEEADNMARDGLRTLVIAKKVLSGKEFELFEEMYNKAWMSLVDRAEAMSKAMEIIEKDMNVLGLTGVEDKLQDDVKVTLENLRNAEMKIWMLTGDKIETAISIARSSRIFHRGTVYLVISDASSVGDVKAKLDLLRGSGYNSLVIDGQSLSFVIESCMDEFIEVASELEAVIGCRYTPTQKAAVARELKNKTRKCVCCIGDGGNDVSMITEANVGIGIVGKEGNQASLAADFSINKFCHVSDLLFWHGRNSYQRTAKVAHLIIHRGLTLTVIQAIFCSLIYFVPVGLFRGELLMLFITVYTFLPIFSIICSSDISRSVVVKFPELYKELTENKLLSYRHFSVWTLIAFYQGTIMMITFYLLKQEFFIISTLTFTSLVLNELLMVILTTTRMTPMVFISSGMSLAIYIVYFALRRGLLRYQRPFYLFLLKITVVNTLAILVSVFQKLWTKYMSPPTYSKLEVLV

SEQ ID NO: 22712 - protein, 1139 aa, Caenorhabditis elegans
MPTEARDNNRHIHLGKVRDPHHQHAQRFCSNRISTCKYNGFSFLPRFLYEQFRRYNNIFFLAIALLQQIPDVSPTGRYTTAVPFLIILSVSALKEIFEDVKRRRSDNKVNAFSVEILVDGHWIEKQWKDVSVGDFIRIDNDSLFPADLLLLASSEQQGMAYIETSNLDGETNLKIKQALDITSTMTSPEKLSQFESEITCEPPSRHVNEFNGNIEINGVARHFGIDQLLLRGARLKNTAWIFGAVIYTGHDSKLLMNSKRAPLKSGTIDVQTNYRIIFLFFVLVALALISATGSEIWRGNNIPQAWYLSFLEHDPKGSFLWGVLTFFILYNNLIPISLQVTLEVVRFFQAIYINNDIEMYDVNSDSCAIARTSNLNEELGQVKFIMSDKTGTLTRNVMKFKRLSIGSRNYGNNEDDEFADASLIEDYRQGDEHSTSILEVLKMMAVCHTVVPENKDGQLIYQSSSPDEAALVRGAASQSVSFHTRQPQKVICNVFGEDETIEILDVIDFTSDRKRMSVIVRDGAGGDIKLYTKGADTVIFERLEHGKEQEEAVEYCTEHLEDYASFGYRTLCFSMRHLTEQEYSQWAPEYKKAILAIDNRAKLLADAAEKLERNMILVGATAIEDKLQEWVPETIQALMAADIRVWMLTGDKRETAINIAHSCALCHTNTELLIVDKTTYEETYQKLEQFVARAIELEKQEKGFAMVIDGKSLLHALTGEARKHFGDLALRCHAVVCCRMSPMQKAEVVEMVRKLAKHVVLAIGDGANDVAMIQAANVGVGISGEEGLQAASASDYAIPRFHFLRRLLLVHGAWNHDRSVKVILYSFYKNICLYIIELWFAMFSAWSGQTIFERWTIGMFNVIFTAWPPVVLGLFDHPVPAEQIMKYPALYASFQNRAFSIGNFSLWIGLAIVHSLSLFFLTYATMEHQVVWDNGLTGGWLMLGNCAYTFVVATVCFKALLECDSWTWPVVVACIGSIGLWIVFVIVYSLVFPHIGGIGADMAGMAAIMMSSYTFWLALLFIPLATLLWDLVIKSLFTIAMPTPRELAVMYNKRTTSFNGFERLASYSSNVLENMRLLTSSLRGSTTGSTRSRTASEASLALAEQTRYGFAFSQDESSAVAQTELIRNVDSTREKPTGR

SEQ ID NO: 22713 - protein, 1222 aa, Caenorhabditis elegans
MFSWLPCCSSTSNEKNAPTERRLRANDREYNAQFKYADNVIKTSKYNIITFIPQNLFEQFQRIANFYFLVLMILQFIPQISSISWYSTAVPLVIVLAFSAIKDGYDDAQRHISDRNVNGRKSYVVRNGSLCEEDWSNVKVGDVIRMMSNQFVANTRWCYGVVVFAGKDTKLMMNSGKTKFKRTSLDRFLNILIVGIVLFLIAMCLICTILCAVWEYQTGRYFTIYLPWDDVVPSPEQRGGRQIALIAFLQFFSYIILLNTVVPISLYVSVEIIRFIHSLWINYDTQMYYENGEKSVPAKAHTTTLNEELGQVQYVFSDKTGTLTRNIMTFNKCTINGISYGDIYDHKGEVIETNDKTKSLDFSWNSASEPTFKFFDKNLVDATKRQVPEIDQFWRLLALCHTVMPERDKGQLVYQAQSPDEHALTSAARNFGYVFRARTPQSITIEVMGNEETHELLAILDFNNDRKRMSVIVKGPDGKIRLYCKGADMMIMQRIHPSTSQIMRTSTNTHLADFANIGLRTLCLGYKDLDPAYFSDWDSRVKKASAAMQDRESAVDALYEEIEKDLILIGATAIEDKLQDGVPEAIARLSEANIKIWVLTGDKTETAINIAYSCRLLTDETKEIVVVDGQTDTEVEVQLKDTRNTFEQILALPSPLGGKPRIEIETIHEESEAISSARSMDRNIVTPDLKSAEMAEHESGGVALVINGDSLAFALGPRLERTFLEVACMCNAVICCRVTPLQKAQVVDLVKRNKKAVTLSIGDGANDVSMIKTAHIGVGISGQEGMQAVLASDYSIGQFKYLERLLLVHGRWSYIRMAKFLRYFFYKNFAFTLTNFWYSFFCGYSAQTVFDAVLIACYNLFFTALPVLAMGSLDQDVDDHYSLRYPKLYLPGQFNLFFNMRIFIYSVLHGMFSSLVIFFIPYGAFYNAAAASGKDLDDYSALAFTTFTALVVVVTGQIAFDTSYWTAISHFVIWGSLVLYFLVCFLLYEWLPVSWIVKTSSSISYGVAFRTMVTPHFWFSILMVSVVLLLPVMLNRFFWLDTHPSFADRLRIRKKMGKKPSAKDDKKTAFKRTAATRRSVRGSLRSGYAFSHSQGFGELILKGKLFKNVENLRGKNNSNAKIHPTSDDLQPMLISSVPDDSQGASSINAMHLPMGTRPQNVPHTLNVNTDDWSQSSDFRPAYAKEPSPLQGTVIRGDGRSHRNHVYSRETQVEEQPDVITRL

SEQ ID NO: 22714 - protein, 1051 aa, Caenorhabditis elegans
MMNSGKTKFKRTSLDRFLNILIVGIVLFLIAMCLICTILCAVWEYQTGRYFTIYLPWDDVVPSPEQRGGRQIALIAFLQFFSYIILLNTVVPISLYVSVEIIRFIHSLWINYDTQMYYENGEKSVPAKAHTTTLNEELGQVQYVFSDKTGTLTRNIMTFNKCTINGISYGDIYDHKGEVIETNDKTKSLDFSWNSASEPTFKFFDKNLVDATKRQVPEIDQFWRLLALCHTVMPERDKGQLVYQAQSPDEHALTSAARNFGYVFRARTPQSITIEVMGNEETHELLAILDFNNDRKRMSVIVKGPDGKIRLYCKGADMMIMQRIHPSTSQIMRTSTNTHLADFANIGLRTLCLGYKDLDPAYFSDWDSRVKKASAAMQDRESAVDALYEEIEKDLILIGATAIEDKLQDGVPEAIARLSEANIKIWVLTGDKTETAINIAYSCRLLTDETKEIVVVDGQTDTEVEVQLKDTRNTFEQILALPSPLGGKPRIEIETIHEESEAISSARSMDRNIVTPDLKSAEMAEHESGGVALVINGDSLAFALGPRLERTFLEVACMCNAVICCRVTPLQKAQVVDLVKRNKKAVTLSIGDGANDVSMIKTAHIGVGISGQEGMQAVLASDYSIGQFKYLERLLLVHGRWSYIRMAKFLRYFFYKNFAFTLTNFWYSFFCGYSAQTVFDAVLIACYNLFFTALPVLAMGSLDQDVDDHYSLRYPKLYLPGQFNLFFNMRIFIYSVLHGMFSSLVIFFIPYGAFYNAAAASGKDLDDYSALAFTTFTALVVVVTGQIAFDTSYWTAISHFVIWGSLVLYFLVCFLLYEWLPVSWIVKTSSSISYGVAFRTMVTPHFWFSILMVSVVLLLPVMLNRFFWLDTHPSFADRLRIRKKMGKKPSAKDDKKTAFKRTAATRRSVRGSLRSGYAFSHSQGFGELILKGKLFKNVENLRGKNNSNAKIHPTSDDLQPMLISSVPDDSQGASSINAMHLPMGTRPQNVPHTLNVNTDDWSQSSDFRPAYAKEPSPLQGTVIRGDGRSHRNHVYSRETQVEEQPDVITRL

SEQ ID NO: 22715 - protein, 815 aa, Caenorhabditis elegans
TFFILYNNLIPISLQVTLEVVRFFQAIYINNDIEMYDVNSDSCAIARTSNLNEELGQVKFIMSDKTGTLTRNVMKFKRLSIGSRNYGNNEDDEFADASLIEDYRQGDEHSTSILEVLKMMAVCHTVVPENKDGQLIYQSSSPDEAALVRGAASQSVSFHTRQPQKVICNVFGEDETIEILDVIDFTSDRKRMSVIVRDGAGGDIKLYTKGADTVIFERLEHGKEQEEAVEYCTEHLEDYASFGYRTLCFSMRHLTEQEYSQWAPEYKKAILAIDNRAKLLADAAEKLERNMILVGATAIEDKLQEWVPETIQALMAADIRVWMLTGDKRETAINIAHSCALCHTNTELLIVDKTTYEETYQKLEQFVARAIELEKQEKGFAMVIDGKSLLHALTGEARKHFGDLALRCHAVVCCRMSPMQKAEVVEMVRKLAKHVVLAIGDGANDVAMIQAANVGVGISGEEGLQAASASDYAIPRFHFLRRFLLVHGAWNHDRSVKVILYSFYKNICLYIIELWFAMFSAWSGQTIFERWTIGMFNVIFTAWPPVVLGLFDHPVPAEQIMKYPALYASFQNRAFSIGNFSLWIGLAIVHSLSLFFLTYATMEHQVVWDNGLTGGWLMLGNCAYTFVVATVCFKALLECDSWTWPVVVACIGSIGLWIVFVIVYSLVFPHIGGIGADMAGMAAIMMSSYTFWLALLFIPLATLLWDLVIKSLFTIAMPTPRELAVMYNKRTTSFNGFERLASYSSNVLENMRLLTSSLRGSTTGSTRSRTASEASLALAEQTRYGFAFSQDESSAVAQTELIRNVDSTREKPTGR

SEQ ID NO: 22716 - protein, 632 aa, Caenorhabditis elegans
MPTEARDNNRHIHLGKVRDPHHQHAQRFCSNRISTCKYNGFSFLPRFLYEQFRRYNNIFFLAIALLQQIPDVSPTGRYTTAVPFLIILSVSALKEIFEDVKRRRSDNKVNAFSVEILVDGHWIEKQWKDVSVGDFIRIDNDSLFPADLLLLASSEQQGMAYIETSNLDGETNLKIKQALDITSTMTSPEKLSQFESEITCEPPSRHVNEFNGNIEINGVARHFGIDQLLLRGARLKNTAWIFGAVIYTGHDSKLLMNSKRAPLKSGTIDVQTNYRIIFLFFVLVALALISATGSEIWRGNNIPQAWYLSFLEHDPKGSFLWGVLTFFILYNNLIPISLQVTLEVVRFFQAIYINNDIEMYDVNSDSCAIARTSNLNEELGQVKFIMSDKTGTLTRNVMKFKRLSIGSRNYGNNEDDEFADASLIEDYRQGDEHSTSILEVLKMMAVCHTVVPENKDGQLIYQSSSPDEAALVRGAASQSVSFHTRQPQKVICNVFGEDETIEILDVIDFTSDRKRMSVIVRDGAGGDIKLYTKGADTVIFERLEHGKEQEEAVEYCTEHLEDYASFGYRTLCFSMRHLTEQEYSQWAPEYKKAILAIDNRAKLLADAAEKLERNMILVGATAIEDKLQEVGK

SEQ ID NO: 22717 - protein, 1150 aa, Drosophila melanogaster
MPSIFRFRLPFRRSELPETGLLNTYDEDFTSSAGYDADDGERRIINLNGPQPTKYGNNRITTAKYSFISFLPAFLFEQFRRYSNCFFLLIAILQQIPEVSPTGRYTTLVPLMFILSVSAIKEIIEDIKRHRADNEINHRSIERLDSGSWCTVRWSELTVGDIIKVGINTFFPADLILLSSSEPQAMCFIETANLDGETNLKIRQALPATAELLETKDLQRLEGRIECELPNRHLYEFNGVLRETGKPPAALGNDQVLQRGAILRNTAWVFGIVVYSGQETKLMKNSTSAPLKRSTVDKLTNTQILMLFMILISLCIISGLCNLFWTREHSETDWYLGLTDFKTKSLGYNLLTFFILYNNLIPISLQVTLELVRFLQAIFINYDIEMYHEESNTPAMARTSNLNEELGMVKYIFSDKTGTLTQNVMEFKKCSIAGYVYTAERTPEESQLVQNILGRHETSAVIEEFLELLSVCHTVIPERKENGNMIYHAASPDERALVEGAQKFGYIFDTRTPKYVEINALGVRKRYEVLNVLEFTSSRKRMSLIVRTPENKIKLFCKGADTVIYERLAPQGQAFREQTLRHLEEFASDGLRTLCLAVADIRPDVYQEWSQTFDKASVALQNRESKLEDAANLIENNLRLLGATAIEDRLQDGVPETIASLLDAGIYIWVLTGDKQETAINIGYSCRLISHSMDIIILNEESLDATREVIHRHYGEFKSSSAKDANVALVIDGTTLKYALSCDLRNDFQDLCILCRVVICCRVSPMQKAEVVEMVTQSTNAVTLAIGDGANDVAMIQKANVGIGISGVEGLQAACASDYSIAQFRYLQRLLLVHGAWNYARISKLILYSFYKNVCLYVIELWFAVYSGWSGQILFERWTIGLYNVLFTAMPPFAMGLFEKFCTAETMIRYPMLYKTSQNAKLFNVKVFWIWIFNALLHSVFLFWLPLAAYTKEVIWSDGKTSDYLLMGNLVYTYVIVTVCLKAGLITNSWTWLTHLAIWGSIVLWFGFLLIYSHVWPMFKFASNFRGMDIQLLSTPVFYFCLMLVPITTLLIDVICKLVHNTVFKTLTEAVRETEIRRSDISEVMNEPRSSFTETARLLRNVFTRRANTRVETDLELSHGYAFSQEEGGAVPQSIIIRAYDTNLPKPEGN

SEQ ID NO: 22718 - protein, 1360 aa, Drosophila melanogaster
MADSGKHASGGHNGANSERRNDQNGRNGRNGHNGHSQGRQLQFLDNPPPSQATFNVRSLWPSIKSGVRRLRSQLLRRTATTGPAMAPSGGADLPPSDNDRAAPSRSGDGNTETDGSNPHRRLDESSVMGSMQSVKNYIKRTRPGRKKRKDDEDFTSSAGYDADDGERRIINLNGPQPTKYGNNRITTAKYSFISFLPAFLFEQFRRYSNCFFLLIAILQQIPEVSPTGRYTTLVPLMFILSVSAIKEIIEDIKRHRADNEINHRSIERLDSGSWCTVRWSELTVGDIIKVGINTFFPADLILLSSSEPQAMCFIETANLDGETNLKIRQALPATAELLETKDLQRLEGRIECELPNRHLYEFNGVLRETGKPPAALGNDQVLQRGAILRNTAWVFGIVVYSGQETKLMKNSTSAPLKRSTVDKLTNTQILMLFMILISLCIISGLCNLFWTREHSETDWYLGLTDFKTKSLGYNLLTFFILYNNLIPISLQVTLELVRFLQAIFINYDIEMYHEESNTPAMARTSNLNEELGMVKYIFSDKTGTLTQNVMEFKKCSIAGYVYTAERTPEESQLVQNILGRHETSAVIEEFLELLSVCHTVIPERKENGNMIYHAASPDERALVEGAQKFGYIFDTRTPKYVEINALGVRKRYEVLNVLEFTSSRKRMSLIVRTPENKIKLFCKGADTVIYERLAPQGQAFREQTLRHLEEFASDGLRTLCLAVADIRPDVYQEWSQTFDKASVALQNRESKLEDAANLIENNLRLLGATAIEDRLQDGVPETIASLLDAGIYIWVLTGDKQETAINIGYSCRLISHSMDIIILNEESLDATREVIHRHYGEFKSSSAKDANVALVIDGTTLKYALSCDLRNDFQDLCILCRVVICCRVSPMQKAEVVEMVTQSTNAVTLAIGDGANDVAMIQKANVGIGISGVEGLQAACASDYSIAQFRYLQRLLLVHGAWNYARISKLILYSFYKNVCLYVIELWFAVYSGWSGQILFERWTIGLYNVLFTAMPPFAMGLFEKFCTAETMIRYPMLYKTSQNAKLFNVKVFWIWIFNALLHSVFLFWLPLAAYTKEVIWSDGKTSDYLLMGNLVYTYVIVTVCLKAGLITNSWTWLTHLAIWGSIVLWFGFLLIYSHVWPMFKFASNFRGMDIQLLSTPVFYFCLMLVPITTLLIDVICKLVHNTVFKTLTEAVRETEIRRSDISEVMNEPRSSDSGFGYALGKLIRSSHILISHDHHPVSESSRTSNLRVENLEMEADTEQQQQSRQRQKWRGGQVATGVARSARNSTTSPITATLHIFTETARLLRNVFTRRANTRVETDLELSHGYAFSQEEGGAVPQSIIIRAYDTNLPKPEGN

SEQ ID NO: 22719 - protein, 1235 aa, Drosophila melanogaster
MPSIFRFRLPFRRSELPETGLLNTYDEDFTSSAGYDADDGERRIINLNGPQPTKYGNNRITTAKYSFISFLPAFLFEQFRRYSNCFFLLIAILQQIPEVSPTGRYTTLVPLMFILSVSAIKEIIEDIKRHRADNEINHRSIERLDSGSWCTVRWSELTVGDIIKVGINTFFPADLILLSSSEPQAMCFIETANLDGETNLKIRQALPATAELLETKDLQRLEGRIECELPNRHLYEFNGVLRETGKPPAALGNDQVLQRGAILRNTAWVFGIVVYSGQETKLMKNSTSAPLKRSTVDKLTNTQILMLFMILISLCIISGLCNLFWTREHSETDWYLGLTDFKTKSLGYNLLTFFILYNNLIPISLQVTLELVRFLQAIFINYDIEMYHEESNTPAMARTSNLNEELGMVKYIFSDKTGTLTQNVMEFKKCSIAGYVYTAERTPEESQLVQNILGRHETSAVIEEFLELLSVCHTVIPERKENGNMIYHAASPDERALVEGAQKFGYIFDTRTPKYVEINALGVRKRYEVLNVLEFTSSRKRMSLIVRTPENKIKLFCKGADTVIYERLAPQGQAFREQTLRHLEEFASDGLRTLCLAVADIRPDVYQEWSQTFDKASVALQNRESKLEDAANLIENNLRLLGATAIEDRLQDGVPETIASLLDAGIYIWVLTGDKQETAINIGYSCRLISHSMDIIILNEESLDATREVIHRHYGEFKSSSAKDANVALVIDGTTLKYALSCDLRNDFQDLCILCRVVICCRVSPMQKAEVVEMVTQSTNAVTLAIGDGANDVAMIQKANVGIGISGVEGLQAACASDYSIAQFRYLQRLLLVHGAWNYARISKLILYSFYKNVCLYVIELWFAVYSGWSGQILFERWTIGLYNVLFTAMPPFAMGLFEKFCTAETMIRYPMLYKTSQNAKLFNVKVFWIWIFNALLHSVFLFWLPLAAYTKEVIWSDGKTSDYLLMGNLVYTYVIVTVCLKAGLITNSWTWLTHLAIWGSIVLWFGFLLIYSHVWPMFKFASNFRGMDIQLLSTPVFYFCLMLVPITTLLIDVICKLVHNTVFKTLTEAVRETEIRRSDISEVMNEPRSSDSGFGYALGKLIRSSHILISHDHHPVSESSRTSNLRVENLEMEADTEQQQQSRQRQKWRGGQVATGVARSARNSTTSPITATLHIFTETARLLRNVFTRRANTRVETDLELSHGYAFSQEEGGAVPQSIIIRAYDTNLPKPEGN

SEQ ID NO: 22720 - protein, 1060 aa, Drosophila melanogaster
MGADKKKSADPLRIQIGGIESRQQKPLNRVTTTKYTWFTFLPLNFYEQFRRAVYFYFLIITIVSFFVNETISPLVSLLPLLFVMIITALKEGLEDYSRSKSDKLVNTARVTVIRNGKEEIINSQFIVPGDLVVVRNDGDVPCDLVLLQSSSADRKCFVNTANLDGETNLKTICVPTNYLLAGDHELQGKDCIVCEPSSADLYTFNGRLELRSGNDGAGSSAGDALPLTIDNLLLRGVRVKSTERVVGCAIYTGMHTKLQLNSRYTGNKSASSEKYINRFMVALIVGMIVVVVVLYLIERHKEAKIVPTMPYQGPPTNFNSAWQIFEDFLSFLLLFNYMVPISAYMNIEVYRIFGMHFMHNDLHLYDEETDQPCRVNASNLNEELGQVNILFSDKTGTLTKNLMKFVNCYVPGTNYQLQNTHLVSEGTDEKFELEKLDADAAVLFEALAVCHTVEVLQEVGDKTLESSESVSEQSHLMSRNIVDRYQASSPDEKALLEGCASLGLVYEGQENDVLSICRYPSAEKVQFKRLHVLEFSSERQRMSVIVRDQSDTIWLYSKGAESAIFPRCKASPLVEQTDAQITKYAQNGLRTMAVGRRMLTDDELFHFEELYRKANTQLSNRNELIASCYETVENELDLLGATALEDALQEHVGETLEALQAAGLKIWVLTGDKVETAYNIGLACRHIPRGSKQHFIINTTEPAELLARLDMIGDDEPEVLIVDGTTITALLEHTPRQFADLALRCRAVLCCRLSPLQKSEIVTLIKRRKKYITAAIGDGANDVSMIQEAHIGIGITGREGKQAARCADFSIARFEMLRRLFLVHGHYNSQRLAFLVLFYCYKNIIITGCMALYQVYDLYSATNVYNSIYLWLFDIVYISFSFTVLAICDKDYSEETLLSHPELYKPLAHNRQASMGVFSLWILNGFVQCFIIFFFTYAMLNDANVLFNGGQTASFQTFGTMLITIIVIVGNLKLLLVAHYMTYRNFAMILASIAAFMLTTYLYNLYTSGELYDVYNQFLSSLPIWLFTIICSVACLLPDFVIKVVNDMYRKVPLKSKPVV

SEQ ID NO: 22721 - protein, 1509 aa, Plasmodium yoelii yoelii
MPQHIKGDNVEASETQIRINGVNKRRHTNSVITSKYTIFNFIFLNAYEQFHKISNIYFFIIGVLQLVPELTATNRIPTILFPLSIVLIANAINDAYEDWNRHRTDKIENNRVCYVISDGDLSQPNISSNVFIKFIQYLKNILFKKSKKIDSIESYYDDEEEDEEEEVIDEIADTNYFINSYDDRLENIDGTIQKRWKDIEVGDIIICRRSDFFCADILLLSSSDPNGICFAETSSLDGETNLKVKEVNKYIFNNLTYNIDEAIEKAKKLRGYILSEKPNKNLSTMNGAIYLESDVNTDVTNNKEIKKSISEGSSHREEIETKKDINNNFIENKSNDDLNSYKHDDKYVKLPFDEKNFVLRGCKLKNIDWVIGMAIYIGKETKIQMNSLKPVIKYSKLEILTNKLTIIIWLIQVFMCIISAYYSAVIVSFSKKSKFKYLPFNLVDPRAPIVSGIVSFFSWIVITANFIPICLIVTMSFVKVVQAYFISCDNNMVYKVEENIPSFVESRQKSMKSRKNFSIEIDETHNKLNEGKSMVGTDKKNGTNPSDSTKIILNSEDDNSDIFKKKSTRMRTFKESREKSYISFNAIPRTSSLIEELGQIEYIFSDKTGTLTCNVMEFRKCAINGISYGTGLTEIKRKILKKNNIPIPQEPVDLDPKNKTPNVNIVDKKLVNQLKDVNHFNHASLIYFFLHLAINHCVMCDTSDNVNTYSSSSPDEEALVYAAKHFGITFLYRKDGKCGIKIFDKVYEIDILATVEFTSKRKMSTIVCRIPVPSNESPEPTPIDNDDMSRPRNVNGVTNDIRNTIEKWNNGNLTTGKGGNGMGDSPVNLSTEKELNISSAAIEQVKDNVANSDVKKEKMINKESNKIEKKNSKDKQTETNNDVISCKNTKKHKIVVFCKGAGCVIIKKLAKKTDVDDLTIEHMETYADEGLRTLCIAYKELSQEEFAVWYNSYKEASLSLNGREENIEKIAEDIEKDLILQGVTGIEDKLQEGVGATIEDLRLSGIHVWMLTGDKIETAINIGIATNLIDNGSEQFIYTEELALNEDLLMKKLDEDIIYIEKSLNLLHFNFDTNKVEESFFKKMISNKYKNTDSLALDHDTYKEDMTLNNNVLIVDGNVLDILLSKPFERKFFYLADKCSSVICGRVSPYQKGSIVSSANRLLKKNTLAIGDGANDCNMIKMANIGVGIRGQEGVQAFNSSDYGISQFRFLRNLILIHGRLSYRRISKLVVYMFYKNIVFIFPLFIYGSISLYSGQKIYYEFLLHLYNVMFTSLPIVILAILDKDVSLNTALNNPCLYKLGIHNFYFNINKFISWVLNSLFQGLLVFIIPLYFLAYYNIPSSTGEPFDIWSIGCVTYLLAVLIVNIKILLETYYLNTSPIVAVSMSIISFIIMSIAFSFIGIGNKSFLGVAILLVKSLRFWLVLLLVLFTALTRDYVYKVYKKNFYPEAYHLLQDEEENNSNTKHIQYSSKCSNNVDETKSSKSEFMGYAFSEADPVCVHFIRKQDKLI

SEQ ID NO: 22722 - protein, 2228 aa, Plasmodium yoelii yoelii
MQTKKGNEKVNNRYKVKRSSKLFSSNSNMKNPDNIENKLSNNFATAEAAWIEKKQKLYKDTNNQPLWDFRKIQINPTDIDELFSFPPNKITSTKYGSYTFVFRILYEQLIRLPNLWFLIISLLEYIPSFQILSDHLYYYKHSSIYLLLSFIIISIIKNLYEDSRRSNIDYQINNRLCHIIDGSTSNLKVVKWMELTVGSIIRLVENEQVPADIILLSCNHSDGSVYVETSLVNGETNLKKKYCVNETRNESSVYSVCNIRGRITCEKPNMNMESFNGSLKLDAHPRATSLSINNVVFKGSYIKNTDYVFGVIIYTGVDTKIMKNTLRNTYKSGYVNKELNTYTIITIIFVFFCVFISILCKWTDDNKYKHGTNLLLITATNGLFKYIMKYIILYSNIIPISVLITLDLISIMQSILIENDNRICVFENETSEPLVSDDNYDIKNLKMKKSYNYFKKYTHFLSNFNLRKFSRSRNSSNNMENYSYNRKSFISTFDKLVKFKNHFNKKDSNHINSKPTSNNIYNRMPAEESYCISENKYTTNFSFSKRSNNNTTSISNYNDDDIIHKQYEIKNIQKKPSYSNVLYKSHSKKSNHIYNELVGEKEISQEINAIHDNQEDDYNNIQNKHDNFSTKDSESKIIKSVSINSKYPIKNENTNIIKYLFPFLFNKKNSNSKIVNLKNYINKYALSQKNSLKDNFYGWGICLNSNMHGDLGNVDFIFTDKTGTLTNNDMSFNICSIAGRVYGRPRKNKNKNKILFSDKSNIYYNTKLENRDFIADQFENRNTLNEENTFNDITNDTIERIKNNPEEIDGDKTHMPNTTKWNIYKGNNMVENKMNEDAKIMNNNCFNTNLDIEDDDDEYKKFLMKNIQDHQKFNENNFDEHTKDSYKKNKSDCASNINDRKKISYPDFDSSQSLGDSSIISSDCSSETDTTSISDYYKSSYDPSSYEYQNSEVNDDMDGDSIQLDYDKKKKKKNDDNDDSKTNQTNKLINKTYIFDKNYLNYLMEHRYPKPKNFRTNVNPEMAKTRCDFNDKKIFIDLNSNTWRSYYIEEFFKCITLCHTIVPYIQFDYIRNKNLAHNSSRHSKVGSNHFERYNNDIKKNTYTDISKTNNELNSNVSRENTYEPKTRRFIRPKKKYSNNSSIFDNTKMFSYSINQAFLDGKRVRPQTSENDYCTKNSLKNENKKNDVIKKESTFQMFVNKFFTKNKIKDKTDKSQNNCTVVKENLKTKKKKKLGDETEDEESNKWNNYYSFTRNKSIMHTGKNHKHGKATKRHSTVSFKRISKEKMMSLSSYSDDKFVTLKCKNKSYNLSYQNSEVSSSHNKKHETDFEDYPSNKIENKSTGTYDDLDKTKDTNVTDNGGSEYNAYLDSIKYQSTSLDEECLIYTSSYLGYRLILRNKNNMCVEIDGNFYNWTIIGINEFTNKRGRMSIVVKPEYMTKGSILYIKGSDASILSLLNLRHSKFFEKKRKKKKKQNFNKYNRTNKYYSVEGEKQINYSTKHHLSDHSLKSEFYETEDYQSGVERKTCKSSIQLDKNNEYDVKDNSEDKKLYMKKKKKNEFKERSRQLEKQLRKFSMKGLRTMVFAFRYLNEKETIEYKKMYDDARMSIYNKETKLENVANHVEKNLTYLGITGVKDRLQKKVMNTMEMLNQSGVRIWMLTGDNIEYSLHIAFLSNFLNSHTKIFHAMLENTSYKKLKREGTALYELFQLEKEEKKPHEKICLLISGKNLQTFLNHNDLQTYFLNMACTSDAVIACRITAKQKAFIVRLIKSRLSPRPNTLAIGDGANDIAMIQEANIGISIMTSKSIISAGYADYCIKNFCYLRKLLFIYGSKHLYSISIILYWNFFKNIILILPVFFYQAYASWSCVKIYPELLHTLISVFWVLIPIIYYMFLQHNLNYDILYNIPLFYALSRRKYNMSILKFLSWAFEAIFYSLVVFFFSYAALSENSHLNNGEVVTINTFGNICFLGCLLISIFRLFLEGSLWSPSIFITCWGCFLFVFFPSILFICIAYLSNEYIREVFRQTFLWNPIYVLLFLWFTTCIICYMFITFTKSLFFPNIYNVVNHWLFEHYQEKYVKYKYSHFISGKSKFLSLKKIRNKLKNKFRRKQKNNNNVKCNFENDVNNNTSIEIKSEKSYKNNDSYLNISLFESNDKTNSTKKFNDQILKKKHEYKLNKNTQLDEEQISNGRNIVLSTNDIHAMEFDEDSVNRNYKNKKNKVNKTKKSQFRC

SEQ ID NO: 22723 - protein, 1424 aa, Plasmodium yoelii yoelii
  unsure (1)..(1424): unsure at all Xaa locations
LISLINEVVDDLKRFIKDLDVNNEIYYTLLQNGNFKKTYSKDITVGDIILIKSKQRVPADCILLRNLSKDEENAIKIEDNKSFVSFRVNKNSNVYNKKKKKNYYHFNQKFDNALIDDKYNESNNNYSEASNNLLFSENEKSPNGMKEGNYLLKDNVEDSNKVGGKNEDNQKKKKKKKXLRKNGIKKKKNDNKLVFNNNSSNETENYTYVKTDKIDGETDWKIKYPISIFQNLKRLKDFFSIDILFILEHPKNDIYKIEASFVMFKYNQYGEFKTVENNNIGNNINDLNISKLNHISDISNILNNNNNNNNQYRSNSFYALKDTEIHANDANKQIGKYEKDEEEDDEEDDEDDDEDEEDEDDEEDVEDEENEEDVEDEKNNLLKKKEGVENLSYKNLGDGNGNNFNNRSMINFVDSEKYEGNNIGTRNGKVENQLILPGNFGDNQPVCNVFPNEDNYNYYNISYRKKLNYDNFILSNSVITSSDVICMVIYTGRDTRVNMSTQISKVKRGMIDKKLNLITVFLFIILALFSMYMCSTKLNNLWYLNFVRFILLFSSVIPISLSVNLNIAKIYYTLVIQKDKEIQTTIIKNSAIIENFGNVDYIFTDKTGTLTENVMVLKIIHIGLDVIHTENEKSGLQNNMRNKVKKKFNKNVLPYNFEDINEDDVDTNSMHLVSNYSINDRKEKGQNNMIRGDKLSAYNYDIENNRINKNYIQSLRQINTKANAMNQINMNGNGYLDFDSYNERIGSSHMKKNNEIGIEKNYVEDNDNMFFEQSKLGINNIMTSDKRNDLIKRFNNVGNNNDSNNNGSDNHNLNVNNYEQRKKKVEQMVDDYLMNKTDLLDYYNDNIDDVEFLKKHKVFQTFLSFLICNNIRTLTKEHNNNDKEKGKKKKEHKEKDFQKKFYYILNVNRKKKNNNNNNRLNKNDKIIETNTNDNYLYDDDDNNNDNFETNSSEDTETFSYSGISYQCSSPDELAFLKYATNCGFILKKKTASKIEIKYKNIALEYDILLHIPFSSETKRMSVFVRNVKNKNIYFFIKGADNILIKKCHEKYKTFIFEESDHLSSVGLRVLVHGFLNIEEQFFHNFSTLYNQNKDVKGQMEKILDLVEKNIKVLAITGVEDKLQEGVGKTIEMLYNSGIKVWVLTGDKIETAICICKNANIKKKKHNIYIFRHENIKSTSQLIREFNSILNNIDSYVLFFDNIIIQNCIKYIPNAFVDFVANARAVVSLLIKKIYKHGTYYKSNKYVCCRCSPIEKKEIALMIKTIKRKKILCIGDGGNDVAMIQSADIGIGVLGKEGKQVVHDSDIIVSKFKNIKKLILYYGNNTFLQTSSLCSFLIHRGFILTYLQFIYSYIFFSIPVAIFQGWLQIGYTTYYTTTPFLSLLLDVKIKKNLIYLYPEIYKNKKHKRKLDLKSFFIIVWMSIFQ

SEQ ID NO: 22724 - protein, 1043 aa, Danio rerio
CGGDERRVDSRTIYVGHRPCPDTEAFIPPKFCDNRIVSSKYTVWNFLPKNLFEQFRRIANFYFLIIFLVQVIVDTPTSPVTSGLPLFFVITVTAIKQGYEDWLRHKADNEVNKYPVTVLEDGRSVKKESEKIKVGDVVEVVEDETFPCDLILLQSSREDGTCFVTTASLDGESNHKTHYTVPDIERDLQVLTAAIECEQPQPDLYKFVGRMHIYKPEQEEAVRSLGPENLLLKGATLKNTKEIYGVAVYTGMETKMALNYQGKSQKRSAVEKSINAFLLVYLCILISKAVVCTTLKYVWQSKEGQDEPWYNEKTQKEKETNMYLKMFTDFLSFMVLFNFIIPVSMYVTVEMQKFLGSFFIKWDNDFFDPEIEEGALVNTSDLNEELGQVEYVFTDKTGTLTQNNMEFIECCIDGFQYRHRDAHGELDGFTVTDGPLNKLQEKAGREKEELFLRALCLCHTVQVKEETLSDQIDGIDGVLPKAEEERGFIASSPDEVALVKGAMEYKLLHVLNFDPVRRRMSVIVQTKSGDTLLFCKGADSSIFPRVRPEEVDRIRLQDGYRTLCVAYKQLSAEEYALADTGLREARLALQDREEKLMAMYNQVETGMSLIGATAVEDRLEEAAETMEALQGAGMKIWVLTGDKMETAKSTCYACRLFQRGTELLELTVRTLEDGRSKREDRLLELLRDYHRRAVQDAPPVKTGVVTRSWSANQEYGFIIDGATLSLVMNPPRDADASLYRGLFLQICQNCTAVLCCRMAPLQKAQIVKMVKNCKGSPITLSIGDGANDVSMILEAHVGIGIKGKEGRQAVRNSDYAIPKLKHLKKLLLAHGHLYYVRIAHLVQYFFYKNLCFILPQFLYQFFCGYSQQPLYDAAYLTMYNICFTSMPILAYSLLEQHIAIEILLDNATLYREIAKNAMLRWRPFLYWTVLGIFQGLLFFFGVRFLFSNPALQDNGQLALDTRHWTWINHFVIWGSLAFYVFFSFFWGGIIWPFLKQQRLYFVFANMLSSVSAWLVIIILILLSLLPEILLAVLRKPKGPHSRQ

SEQ ID NO: 22725 - protein, 653 aa, Macaca fascicularis
MACNLCYEAESPDEAALVYAARAYQCTLQSRTPEQVMVDFAASGPLTFQLLHILPFDSVRKRMSVVVRHPLSNQVVVYTKGADSVIMELLSVASPDGAGPEKQQMIIREKTQRHLDDYAKQGLRTLCIAKKVMSDTEYAEWLRNHFLAETSIDNREELLLESAMRLENKLTLLGATGIEDRLQEGVPESIEALHKAGIKIWMLTGDKQETAVNIAYACMLMSTILKELQKKTQALPEQVSLSVDLHQPPVPQDSGLRAGLIITGKTLEFALQESLQKQFLELTSWCQTVVCCRATPLQKSEVVKLVRSHLQVMTLAIGDGANDVSMIQVADIGIGVSGQEGMQAVMASDFAVSQFKHLSKLLLVHGHWCYTRLSNMILYFFYKNVAYVNLLFWYQFFCGFSGTSMTDYWVLIFFNLLFTSAPPVIYGVLEKDVSAETLMQLPELYKSGQKSEAYLPHTFWITLLDAFYQSLVCFFVPYFTYQGSDIDIFAFGNPLNTAALFIILLHLIIESKSLTWIHMLVITGSILSYFLFAIVFGAMCVTCNPPSNPYWIMQEHVLDPVFYLVCILTTCIALLPRFVYRGAGKMNQVTSNYANQSADKSGRRPKPGPSTVFAMKSATSCAIEQGNLSLCETALDQGYSETKAFEMARPCKD

SEQ ID NO: 22726 - protein, 625 aa, Macaca fascicularis
MGSLAQREDLQDDSDKNSAFTWEVQANNRTYNAQFKEKVFLCWQKKKYKTNVIRTAKYNFFSFLPLNLYEQLHRVSNLYFLLIIILQSIPDISTLPWFSLGAPMVCLLFIRATRDLVDDIGRHKSDRTVNNRPCQILMGKSFKRKKWQNLCVGDVVCLHKDNIVPADMLLLASTEPSSLCYVETVDIDGETNLKFRQALMVTHKELTSVKKMASFQGTVTCEAPNSRLHHFVGCLEWNDKKYSLDIGNLLLRGCRIRNTDTCYGMVIYAGFDTKIMKNCGKIHLKRTKLDVLMNKLVVVIFISVEEGPSEEIFAVEPLPHLYRESRTRRSSYAFSHREGYADLITQGTILRRGPGVSSVIASESIDPSDEEAFSSPKESHWHLRKMSFLGKKKRQSQGQMSFLEAQHFPTSSSSFSMDRQSALYSENQLALPRYVLTGTHRLSGSFQEQLPRVQERPLSPKQRPSSPEKLPLTKERSYSHLEKPPLHRESQLSSSESQPQPPGSQSLLSGQLTLESQPDSSEEKSAFSKPSAPLWKSWQKEPLTPKEGMVPLPDKTHESQVETLPPSLAESSTSTSEQPMEVEPWPVEKQSSSSMEWLLVPGEEQPSLPPEEQSLPSAGGTRGQQ

SEQ ID NO: 22727 - protein, 1164 aa, Homo sapiens
MPTMRRTVSEIRSRAEGYEKTDDVSEKTSLADQEEVRTIFINQPQLTKFCNNHVSTAKYNIITFLPRFLYSQFRRAANSFFLFIALLQQIPDVSPTGRYTTLVPLLFILAVAAIKEIIEDIKRHKADNAVNKKQTQVLRNGAWEIVHWEKVAVGEIVKVTNGEHLPADLISLSSSEPQAMCYIETSNLDGETNLKIRQGLPATSDIKDVDSLMRISGRIECESPNRHLYDFVGNIRLDGHGTVPLGADQILLRGAQLRNTQWVHGIVVYTGHDTKLMQNSTSPPLKLSNVERITNVQILILFCILIAMSLVCSVGSAIWNRRHSGKDWYLNLNYGGASNFGLNFLTFIILFNNLIPISLLVTLEVVKFTQAYFINWDLDMHYEPTDTAAMARTSNLNEELGQVKYIFSDKTGTLTCNVMQFKKCTIAGVAYGHVPEPEDYGCSPDEWQNSQFGDEKTFSDSSLLENLQNNHPTAPIICEFLTMMAVCHTAVPEREGDKIIYQAASPDEGALVRAAKQLNFVFTGRTPDSVIIDSLGQEERYELLNVLEFTSARKRMSVIVRTPSGKLRLYCKGADTVIYDRLAETSKYKEITLKHLEQFATEGLRTLCFAVAEISESDFQEWRAVYQRASTSVQNRLLKLEESYELIEKNLQLLGATAIEDKLQDQVPETIETLMKADIKIWILTGDKQETAINIGHSCKLLKKNMGMIVINEGSLDGTRETLSRHCTTLGDALRKENDFALIIDGKTLKYALTFGVRQYFLDLALSCKAVICCRVSPLQKSEVVEMVKKQVKVVTLAIGDGANDVSMIQTAHVGVGISGNEGLQAANSSDYSIAQFKYLKNLLMIHGAWNYNRVSKCILYCFYKNIVLYIIEIWFAFVNGFSGQILFERWCIGLYNVMFTAMPPLTLGIFERSCRKENMLKYPELYKTSQNALDFNTKVFWVHCLNGLFHSVILFWFPLKALQYGTAFGNGKTSDYLLLGNFVYTFVVITVCLKAGLETSYWTWFSHIAIWGSIALWVVFFGIYSSLWPAIPMAPDMSGEAAMLFSSGVFWMGLLFIPVASLLLDVVYKVIKRTAFKTLVDEVQELEAKSQDPGAVVLGKSLTERAQLLKNVFKKNHVNLYRSESLQQNLLHGYAFSQDENGIVSQSEVIRAYDTTKQRPDEW

SEQ ID NO: 22728 - protein, 1161 aa, Homo sapiens [sequence omitted]

SEQ ID NO: 22729 - protein, 1251 aa, Homo sapiens
MSTERDSETTFDEDSQPNDEVVPYSDDETEDELDDQGSAVEPEQNRVNREAEENREPFRKECTWQVKANDRKYHEQPHFMNTKFLCIKESKYANNAIKTYKYNAFTFIPMNLFEQFKRAANLYFLALLILQAVPQISTLAWYTTLVPLLVVLGVTAIKDLVDDVARHKMDKEINNRTCEVIKDGRFKVAKWKEIQVGDVIRLKKNDFVPADILLLSSSEPNSLCYVETAELDGETNLKFKMSLEITDQYLQREDTLATFDGFIECEEPNNRLDKFTGTLFWRNTSFPLDADKILLRGCVIRNTDFCHGLVIFAGADTKIMKNSGKTRFKRTKIDYLMNYMVYTIFVVLILLSAGLAIGHAYWEAQVGNSSWYLYDGEDDTPSYRGFLIFWGYIIVLNTMVPISLYVSVEVIRLGQSHFINWDLQMYYAEKDTPAKARTTTLNEQLGQIHYIFSDKTGTLTQNIMTFKKCCINGQIYGDHRDASQHNHNKIEQVDFSWNTYADGKLAFYDHYLIEQIQSGKEPEVRQFFFLLAVCHTVMVDRTDGQLNYQAASPDEGALVNAARNFGFAFLARTQNTITISELGTERTYNVLAILDFNSDRKRMSIIVRTPEGNIKLYCKGADTVIYERLHRMNPTKQETQDALDIFANETLRTLCLCYKEIEEKEFTEWNKKFMAASVASTNRDEALDKVYEEIEKDLILLGATAIEDKLQDGVPETISKLAKADIKIWVLTGDKKETAENIGFACELLTEDTTICYGEDINSLLHARMENQRNRGGVYAKFAPPVQESFFPPGGNRALIITGSWLNEILLEKKTKRNKILKLKFPRTEEERRMRTQSKRRLEAKKEQRQKNFVDLACECSAVICCRVTPKQKAMVVDLVKRYKKAITLAIGDGANDVNMIKTAHIGVGISGQEGMQAVMSSDYSFAQFRYLQRLLLVHGRWSYIRMCKFLRYFFYKNFAFTLVHFWYSFFNGYSAQTAYEDWFITLYNVLYTSLPVLLMGLLDQDVSDKLSLRFPGLYIVGQRDLLFNYKRFFVSLLHGVLTSMILFFIPLGAYLQTVGQDGEAPSDYQSFAVTIASALVITVNFQIGLDTSYWTFVNAFSIFGSIALYFGIMFDFHSAGIHVLFPSAFQFTGTASNALRQPYIWLTIILTVAVCLLPVVAIRFLSMTIWPSESDKIQKHRKRLKAEEQWQRRQQVFRRGVSTRRSAYAFSHQRGYADLISSGRSIRKKRSPLDAIVADGTAEYRRTGDS

SEQ ID NO: 22730 - protein, 1082 aa, Homo sapiens
GRRFILVLRKILQNEKWMNVKVGDIIKLENNQFVAADLLLLSSSEPHGLCYVETAELDGETNLKVRHALSVTSELGADISRLAGFDGIVVCEVPNNKLDKFMGILSWKDSKHSLNNEKIILRGCILRNTSWCFGMVIFAGPDTKLMQNSGKTKFKRTSIDRLMNTLVLWIFGFLICLGIILAIGNSIWESQTGDQFRTFLFWNEGEKSSVFSGFLTFWSYIIILNTVVPISLYVSVEVIRLGHSYFINWDRKMYYSRKAIPAVARTTTLNEELGQIEYIFSDKTGTLTQNIMTFKRCSINGRIYGEVHDDLDQKTEITQEKEPVDFSVKSQADREFQFFDHHLMESIKMGDPKVHEFLRLLALCHTVMSEENSAGELIYQVQSPDEGALVTAARNFGFIFKSRTPETITIEELGTLVTYQLLAFLDFNNTRKRMSVIVRNPEGQIKLYSKGADTILFEKLHPSNEVLLSLTSDHLSEFAGEGLRTLAIAYRDLDDKYFKEWHKMLEDANAATEERDERIAELYEEIERDLMLLGATAVEDKLQEGVIETVTSLSLANIKIWVLTGDKQETAINIGYACNMLTDDMNDVFVIAGNNAVEVREELRKAKQNLFGQNRNFSNGHVVCEKKQQLELDSIVEETITGDYALIINGHSLAHALESDVKNDLLELACMCKTVICCRVTPLQKAQVVELVKKYRNAVTLAIGDGANDVSMIKSAHIGVGISGQEGLQAVLASDYSFAQFRYLQRLLLVHGRWSYFRMCKFLCYFFYKNFAFTLVHFWFGFFCGFSAQTVYDQWFITLFNIVYTSLPVLAMGIFDQDVSDQNSVDCPQLYKPGQLNLLFNKRKFFICVLHGIYTSLVLFFIPYGAFYNVAGEDGQHIADYQSFAVTMATSLVIVVSVQIALDTSYWTFINHVFIWGSIAIYFSILFTMHSNGIFGIFPNQFPFVGNARHSLTQKCIWLVILLTTVASVMPVVAFRFLKVDLYPTLSDQIRRWQKAQKKARPPSSRRPRTRRSSSRRSGYAFAHQEGYGELITSGKNMRAKNPPPTSGLEKTHYNSTSWIENLCKKTTDTVSSFSQDKTVKL

SEQ ID NO: 22731 - protein, 790 aa, Homo sapiens
MYYIGNDTPAMARTSNLNEELGQVKYLFSDKTGTLTCNIMNFKKCSIAGVTYGHFPELAREPSSDDFCRMPPPCSDSCDFDDPRLLKNIEDRHPTAPCIQEFLTLLAVCHTVVPEKDGDNIIYQASSPDEAALVKGAKKLGFVFTARTPFSVIIEAMGQEQTFGILNVLEFSSDRKRMSVIVRTPSGRLRLYCKGADNVIFERLSKDSKYMEETLCHLEYFATEGLRTLCVAYADLSENEYEEWLKVYQEASTILKDRAQRLEECYEIIEKNLLLLGATAIEDRLQAGVPETIATLLKAEIKIWVLTGDKQETAINIGYSCRLVSQNMALILLKEDSLDATRAAITQHCTDLGNLLGKENDVALIIDGHTLKYALSFEVRRSFLDLALSCKAVICCRVSPLQKSEIVDVVKKRVKAITLAIGDGANDVGMIQTAHVGVGISGNEGMQATNNSDYAIAQFSYLEKLLLVHGAWSYNRVTKCILYCFYKNVVLYIIELWFAFVNGFSGQILFERWCIGLYNVIFTALPPFTLGIFERSCTQESMLRFPQLYKITQNGEGFNTKVFWGHCINALVHSLILFWFPMKALEHDTVLTSGHATDYLFVGNIVYTYVVVTVCLKAGLETTAWTKFSHLAVWGSMLTWLVFFGIYSTIWPTIPIAPDMRGQATMVLSSAHFWLGLFLVPTACLIEDVAWRAAKHTCKKTLLEEVQELETKSRVLGKAVLRDSNGKRLNERDRLIKRLGRKTPPTLFRGSSLQQGVPHGYAFSQEEHGAVSQEEVIRAYDTTKKKSRKK

SEQ ID NO: 22732 - protein, 1300 aa, Homo sapiens
MGTGPAQTPRSTRAGPEPSPAPPGPGDTGDSDVTQEGSGPAGIRGGETVIRAGMGDSPGRGAPERRHKAQPGRARKYEWRPEGPTSMGSLGQREDLQDEDRNSAFTWKVQANNRAYNGQFKEKVILCWQRKKYKTNVIRTAKYNFYSFLPLNLYEQFHRVSNLFFLIIIILQSIPDISTLPWFSLSTPMVCLLFIRATRDLVDDMGRHKSDRAINNRPCQILMGKSFKQKKWQDLCVGDVVCLRKDNIVPADMLLLASTEPSSLCYVETVDIDGETNLKFRQALMVTHKELATIKKMASFQGTVTCEAPNSRMHHFVGCLEWNDKKYSLDIGNLLLRGCRIRNTDTCYGLVIYAGFDTKIMKNCGKIHLKRTKLDLLMNKLVVVIFISVVLVCLVLAFGFGFSVKEFKDHHYYLSGVHGSSVAAESFFVFWSFLILLSVTIPMSMFILSEFIYLGNSVFIDWDVQMYYKPQDVPAKARSTSLNDHLGQVEYIFSDKTGTLTQNILTFNKCCISGRVYGPDSEATTRPKENPYLWNKFADGKLLFHNAALLHLVRTNGDEAVREFWRLLAICHTVMVRESPRERPDQLLYQAASPDEGALVTAARNFGYVFLSRTQDTVTIMELGEERVYQVLAIMDFNSTRKRMSVLVRKPEGAICLYTKGADTVIFERLHRRGAMEFATEEALAAFAQETLRTLCLAYREVAEDIYEDWQQRHQEASLLLQNRAQALQQLLGATAIEDRLQDGVPETIKCLKKSNIKIWVLTGDKQETAVNIGFACELLSENMLILEEKEISRILETYWENSNNLLTRESLSQVKLALVINGDFLDKLLVSLRKEPRALAQNVNMDEAWQELGQSRRDFLYARRLSLLCRRFGLPLAAPPAQDSRARRSSEVLQERAFVDLASKCQAVICCRVTPKQKALIVALVKKYHQVVTLAIGDGANDINMIKTADVGVGLAGQEGMQAVQNSDFVLGQFCFLQRLLLVHGRWSYVRICKFLRYFFYKSMASMMVQVWFACYNGFTGQPLYEGWFLALFNLLYSTLPVLYIGLFEQDVSAEQSLEKPELYVVGQKDELFNYWVFVQAIAHGVTTSLVNFFMTLWISRDTAGPASFSDHQSFAVVVALSCLLSITMEVILIIKYWTALCVATILLSLGFYAIMTTTTQSFWLFRVSPTTFPFLYADLSVMSSPSILLVVLLSVSINTFPVLALRVIFPALKELRAKEEKVEEGPSEEIFTMEPLPHVHRESRARRSSYAFSHREGYANLITQGTILRRGPGVSSDIASESLDPSDEEAASSPKESQ

SEQ ID NO: 22733 - protein, 729 aa, Homo sapiens
PSSDDFCRMPPPCSDSCDFDDPRLLKNIEDRHPTAPCIQEFLTLLAVCHTVVPEKDGDNIIYQASSPDEAALVKGAKKLGFVFTARTPFSVIIEAMGQEQTFGILNVLEFSSDRKRMSVIVRTPSGRLRLYCKGADNVIFERLSKDSKYMEETLCHLEYFATEGLRTLCVAYADLSENEYEEWLKVYQEASTILKDRAQRLEECYEIIEKNLLLLGATAIEDRLQAGVPETIATLLKAEIKIWVLTGDKQETAINIGYSCRLVSQNMALILLKEDSLDATRAAITQHCTDLGNLLGKENDVALIIDGHTLKYALSFEVRRSFLDLALSCKAVICCRVSPLQKSEIVDVVKKRVKAITLAIGDGANDVGMIQTAHVGVGISGNEGMQATNNSDYAIAQFSYLEKLLLVHGAWSYNRVTKCILYCFYKNVVLYIIELWFAFVNGFSGQILFERWCIGLYNVIFTALPPFTLGIFERSCTQESMLRFPQLYKITQNGEGFNTKVFWGHCINALVHSLILFWFPMKALEHDTVLTSGHATDYLFVGNIVYTYVVVTVCLKAGLETTAWTKFSHLAVWGSMLTWLVFFGIYSTIWPTIPIAPDMRGQATMVLSSAHFWLGLFLVPTACLIEDVAWRAAKHTCKKTLLEEVQELETKSRVLGKAVLRDSNGKRLNERDRLIKRLGRKTPPTLFRGSSLQQGVPHGYAFSQEEHGAVSQEEVIRAYDTTKKKSRKK

SEQ ID NO: 22734 - protein, 1010 aa, Homo sapiens
MNQCPVHFIQHGKLVRKQSRKLRVGDIVMVKEDETFPCDLIFLSSNRGDGTCHVTTASLDGESSHKTHYAVQDTKGFHTEEDIGGLHATIECEQPQPDLYKFVGRINVYSDLNDPVVRPLGSENLLLRGATLKNTEKIFGVAIYTGMETKMALNYQSKSQKRSAVEKSMNAFLIVYLCILISKALINTVLKYMWQSEPFRDEPWYNQKTESERQRNLFLKAFTDFLAFMVLFNYIIPVSMYVTVEMQKFLGSYFITWDEDMFDEETGEGPLVNTSDLNEELGQVEYIFTDKTGTLTENNMEFKECCIEGHVYVPHVICNGQVLPESSGIDMIDSSPSVNGREREELFFRALCLCHTVQVKDDDSVDGPRKSPDGGKSCVYISSSPDEVALVEGVQRLGFTYLRLKDNYMEILNRENHIERFELLEILSFDSVRRRMSVIVKSATGEIYLFCKGADSSIFPRVIEGKVDQIRARVERNAVEGLRTLCVAYKRLIQEEYEGICKLLQAAKVALQDREKKLAEAYEQIEKDLTLLGATAVEDRLQEKAADTIEALQKAGIKVWVLTGDKMETAAATCYACKLFRRNTQLLELTTKRIEEQSLHDVLFELSKTVLRHSGSLTRDNLSGLSADMQDYGLIIDGAALSLIMKPREDGSSGNYRELFLEICRSCSAVLCCRMAPLQKAQIVKLIKFSKEHPITLAIGDGANDVSMILEAHVGIGVIGKEGRQAARNSDYAIPKFKHLKKMLLVHGHFYYIRISELVQYFFYKNVCFIFPQFLYQFFCGFSQQTLYDTAYLTLYNISFTSLPILLYSLMEQHVGIDVLKRDPTLYRDVAKNALLRWRVFIYWTLLGLFDALVFFFGAYFVFENTTVTSNGQIFGNWTFGTLVFTVMVFTVTLKLALDTHYWTWINHFVIWGSLLFYVVFSLLWGGVIWPFLNYQRMYYVFIQMLSSGPAWLAIVLLVTISLLPDVLKKVLCRQLWPTATERVQTKSQCLSVEQSTIFMLSQTSSSLSF

SEQ ID NO: 22735 - protein, 933 aa, Homo sapiens
NSGRTKFKRTSIDRLMNTLVLWIFGFLVCMGVILAIGNAIWEHEVGMRFQVYLPWDEAVDSAFFSGFLSFWSYIIILNTVVPISLYVSVEVIRLGHSYFINWDKKMFCMKKRTPAEARTTTLNEELGQVEYIFSDKTGTLTQNIMVFNKCSINGHSYGDVFDVLGHKAELGERPEPVDFSFNPLADKKFLFWDPSLLEAVKIGDPHTHEFFRLLSLCHTVMSEEKNEGELYYKAQSPDEGALVTAARNFGFVFRSRTPKTITVHEMGTAITYQLLAILDFNNIRKRMSVIVRNPEGKIRLYCKGADTILLDRLHHSTQELLNTTMDHLNEYAGEGLRTLVLAYKDLDEEYYEEWAERRLQASLAQDSREDRLASIYEEVENNMMLLGATAIEDKLQQGVPETIALLTLANIKIWVLTGDKQETAVNIGYSCKMLTDDMTEVFIVTGHTVLEVREELRKAREKMMDSSRSVGNGFTYQDKLSSSKLTSVLEAVAGEYALVINGHSLAHALEADMELEFLETACACKAVICCRVTPLQKAQVVELVKKYKKAVTLAIGDEANDVSMIKTAHIGVGISGQEGIQAVLASDYSFSQFKFLQRLLLVHGRWSYLRMCKFLCYFFYKNFAFTMVHFWFGFFCGFSAQTVYDQYFITLYNIVYTSLPVLAMGVFDQDVPEQRSMEYPKLYEPGQLNLLFNKREFFICIAQGIYTSVLMFFIPYGVFADATRDDGTQLADYQSFAVTVATSLVIVVSVQIGLDTGYWTAINHFFIWGSLAVYFAILFAMHSNGLFDMFPNQFRFVGNAQNTLAQPTVWLTIVLTTVVCIMPVVAFRFLRLNLKPDLSDTVRYTQLVRKKQKAQHRCMRRVGRTGSRRSGYAFSHQEGFGELIMSGKNMRLSSLALSSFTTRSSSSWIESLRRKKSDSASSPSGGADKPLKG

SEQ ID NO: 22736 - protein, 945 aa, Homo sapiens
DLCVGDVVCLRKDNIVPADMLLLASTEPSSLCYVETVDIDGETNLKFRQALMVTHKELATIKKMASFQGTVTCEAPNSRMHHFVGCLEWNDKKYSLDIGNLLLRGCRIRNTDTCYGLVIYAGFDTKIMKNCGKIHLKRTKLDLLMNKLVVVIFISVVLVCLVLAFGFGFSVKEFKDHHYYLSGVHGSSVAAESFFVFWSFLILLSVTIPMSMFILSEFIYLGNSVFIDWDVQMYYKPQDVPAKARSTSLNDHLGQVEYIFSDKTGTLTQNILTFNKCCISGRVYGAGPCPRHPQENPYLWNKFADGKLLFHNAALLHLVRTNGDEAVREFWRLLAICHTVMVRESPHQLLYQAASPDEGALVTAARNFGYVFLSRTQDTVTIMELGEERVYQVLAIMDFNSTRKRMSVLVRKPEGAICLYTKGADTVIFERLHRRGAMEFATEEALAAFAQETLRTLCLAYREVAEDIYEDWQQRHQEASLLLQNRAQALQQVYNEMEQDLRLLGATAIEDRLQDGVPETIKCLKKSNIKIWVLTGDKQETAVNIGFACELLSENMLILEEKEISRILETYWENSNNLLTRESLSQVKLALVINGDFLDKLLVSLRKEPRALAQNVNMDEAWQELGQSRRDFLYARRLSLLCRRFGLPLAAPPAQDSRARRSSEVLQERAFVDLASKCQAVICCRVTPKQKALIVALVKKYHQVVTLAIGDGANDINMIKTADVGVGLAGQEGMQAVQNSDFVLGQFCFLQRLLLVHGRWSYVRICKFLRYFFYKSMASMMVQVWFACYNGFTGQPLYEGWFLALFNLLYSTLPVLYIGLFEQDVSAEQSLEKPELYVVGQKDELFNYWVFVQAIAHGVTTSLVNFFMTLWISRDTAGPASFSDHQSFAVVVALSCLLSITMEVILIIKYWTALCVATILLSLGFYAIMTTTTQSFWLFRMPTSA

SEQ ID NO: 22737 - protein, 962 aa, Homo sapiens
CAGEEKRVGTRTVFVGNHPVSETEAYIAQRFCDNRIVSSKYTLWNFLPKNLFEQFRRIANFYFLIIFLVQVTVDTPTSPVTSGLPLFFVITVTAIKQGYEDCLRHRADNEVNKSTVYIIENAKRVRKESEKIKVGDVVEVQADETFPCDLILLSSCTTDGTCYVTTASLDGESNCKTHYAVRDTIALCTAESIDTLRAAIECEQPQPDLYKSLGPENLLLKGATLKNTEKIYGVAVYTGMETKMALNYQGKSQKRSAVEKSINAFLIVYLFILLTKAAVCTTLKYVWQSTPYNDEPWYNQKTQKERETLKVLKMFTDFLSFMVLFNFIIPVSMYVTVEMQKFLGSFFISWDKDFYDEEINEGALVNTSDLNEELGQVDYVFTDKTGTLTENSMEFIECCIDGHKYKGVTQEVDGLSQTDGTLTYFDKVDKNREELFLRALCLCHTVEIKTNDAVDGATESAELTYISSSPDEIALVKGAKRYGFTFLGNRNGYMRVENQRKEIEEYELLHTLNFDAVRRRMSVIVKTQEGDILLFCKGADSAVFPRVQNHEIELTKVHVERNAMDGYRTLCVAFKEIAPDDYERINRQLIEAKMALQDREEKMEKVFDDIETNMNLIGATAVEDKLQDQAAETIEALHAAGLKVWVLTGDKMETAKSTCYACRLFQTNTELLELTTKTIEESERKEDRLHELLIEYRKKLLHEFPKSTRSFKKAWTEHQEYGLIIDGSTLSLILNSSQDSSSNNYKSIFLQICMKCTAVLCCRMAPLQKAQIVRMVKNLKGSPITLSIGDGANDVSMILESHVGIGIKGKEGRQAARNSDYSVPKFKHLKKLLLAHGHLYYVRIAHLVQYFFYKNLCFILPQFLYQFFCGFSQQPLYDAAYLTMYNICFTSLPILAYSLLEQHINIDTLTSDPRLYMKISGNAMLQLGPFLYWTFLAAFEGTVFFFGTYFLFQTASLEENGK

SEQ ID NO: 22738 - protein, 1026 aa, Homo sapiens
MGTGPAQTPRSTRAGPEPSPAPPGPGDTGDSDVTQEGSGPAGIRGGETVIRAGMGDSPGRGAPERRHKAQPGRARKYEWRPEGPTSMGSLGQREDLQDEDRNSAFTWKVQANNRAYNGQFKEKVILCWQRKKYKTNVIRTAKYNFYSFLPLNLYEQFHRVSNLFFLIIIILQSIPDISTLPWFSLSTPMVCLLFIRATRDLVDDMGRHKSDRAINNRPCQILMGKSFKQKKWQDLCVGDVVCLRKDNIVPADMLLLASTEPSSLCYVETVDIDGETNLKFRQALMVTHKELATIKKMASFQGTVTCEAPNSRMHHFVGCLEWNDKKYSLDIGNLLLRGCRIRNTDTCYGLVIYAGFDTKIMKNCGKIHLKRTKLDLLMNKLVVVIFISVVLVCLVLAFGFGFSVKEFKDHHYYLSGVHGSSVAAESFFVFWSFLILLSVTIPMSMFILSEFIYLGNSVFIDWDVQMYYKPQDVPAKARSTSLNDHLGQVEYIFSDKTGTLTQNILTFNKCCISGRVYGPDSEATTRPKENPYLWNKFADGKLLFHNAALLHLVRTNGDEAVREFWRLLAICHTVMVRESPRERPDQLLYQAASPDEGALVTAARNFGYVFLSRTQDTVTIMELGEERVYQVLAIMDFNSTRKRMSVLVRKPEGAICLYTKGADTVIFERLHRRGAMEFATEEALAAFAQETLRTLCLAYREVAEDIYEDWQQRHQEASLLLQNRAQALQQLLGATAIEDRLQDGVPETIKCLKKSNIKIWVLTGDKQETAVNIGFACELLSENMLILEEKEISRILETYWENSNNLLTRESLSQVKLALVINGDFLDKLLVSLRKEPRALAQNVNMDEAWQELGQSRRDFLYARRLSLLCRRFGLPLAAPPAQDSRARRSSEVLQERAFVDLASKCQAVICCRVTPKQKALIVALVKKYHQVVTLAIGDGANDINMIKTADVGVGLAGQEGMQAVQNSDFVLGQFCFLQRLLLVHGRWSYVRICKFLRYFFYKSMASMMVQVWFACYNGFTGSAPV

SEQ ID NO: 22739 - protein, 613 aa, Homo sapiens
MSVIVRTPSGRLRLYCKGADNVIFERLSKDSKYMEETLCHLEYFATEGLRTLCVAYADLSENEYEEWLKVYQEASTILKDRAQRLEECYEIIEKNLLLLGATAIEDRLQAGVPETIATLLKAEIKIWVLTGDKQETAINIGYSCRLVSQNMALILLKEDSLDATRAAITQHCTDLGNLLGKENDVALIIDGHTLKYALSFEVRRSFLDLALSCKAVICCRVSPLQKSEIVDVVKKRVKAITLAIGDGANDVGMIQTAHVGVGISGNEGMQATNNSDYAIAQFSYLEKLLLVHGAWSYNRVTKCILYCFYKNVVLYIIELWFAFVNGFSGQILFERWCIGLYNVIFTALPPFTLGIFERSCTQESMLRFPQLYKITQNGEGFNTKVFWGHCINALVHSLILFWFPMKALEHDTVFDSGHATDYLFVGNIVYTYVVVTVCLKAGLETTAWTKFSHLAVWGSMLTWLVFFGIYSTIWPTIPIAPDMRGQATMVLSSAHFWLGLFLVPTACLIEDVAWRAAKHTCKKTLLEEVQELETKSRVLGKAVLRDSNGKRLNERDRLIKRLGRKTPPTLFRGSSLQQGVPHGYAFSQEEHGAVSQEEVIRAYDTTKKKSRKK

SEQ ID NO: 22740 - protein, 893 aa, Homo sapiens
HAYWEAQVGNSSWYLYDGEDDTPSYRGFLIFWGYIIVLNTMVPISLYVSVEVIRLGQSHFINWDLQMYYAEKDTPAKARTTTLNEQLGQIHYIFSDKTGTLTQNIMTFKKCCINGQIYGDHRDASQHNHNKIEQVDFSWNTYADGKLAFYDHYLIEQIQSGKEPEVRQFFFLLAVCHTVMVDRTDGQLNYQAASPDEGALVNAARNFGFAFLARTQNTITISELGTERTYNVLAILDFNSDRKRMSIIVRTPEGNIKLYCKGADTVIYERLHRMNPTKQETQDALDIFANETLRTLCLCYKEIEEKEFTEWNKKFMAASVASTNRDEALDKVYEEIEKDLILLGATAIEDKLQDGVPETISKLAKADIKIWVLTGDKKETAENIGFACELLTEDTTICYGEDINSLLHARMENQRNRGGVYAKFAPPVQESFFPPGGNRALIITGSWLNEILLEKKTKRNKILKLKFPRTEEERRMRTQSKRRLEAKKEQRQKNFVDLACECSAVICCRVTPKQKAMVVDLVKRYKKAITLAIGDGANDVNMIKTAHIGVGISGQEGMQAVMSSDYSFAQFRYLQRLLLVHGRWSYIRMCKFLRYFFYKNFAFTLVHFWYSFFNGYSAQTAYEDWFITLYNVLYTSLPVLLMGLLDQDVSDKLSLRFLGLYIVGQRDLLFNYKRFFVSLLHGVLTSMILFFIPLGAYLQTVGQDGEAPSDYQSFAVTIASALVITVNFQIGLDTSYWTFVNAFSIFGSIALYFGIMFDFHSAGIHVLFPSAFQFTGTASNALRQPYIWLTIILTVAVCLLPVVAIRFLSMTIWPSESDKIQKHRKRLKAEEQWQRRQQVFRRGVSTRRSAYAFSHQRGYADLISSGRSIRKKRSPLDAIVADGTAEYRRTGDS

SEQ ID NO: 22741 - protein, 908 aa, Homo sapiens
DLCVGDVVCLRKDNIVPADMLLLASTEPSSLCYVETVDIDGETNLKFRQALMVTHKELATIKKMASFQGTVTCEAPNSRMHHFVGCLEWNDKKYSLDIGNLLLRGCRIRNTDTCYGLVIYADGYMFVGFDTKIMKNCGKIHLKRTKLDLLMNKLVVVIFISVVLVCLVLAFGFGFSVKEFKDHHYYLSGVHGSSVAAESFFVFWSFLILLSVTIPMSMFILSEFIYLGNSVFIDWDVQMYYKPQDVPAKARSTSLNDHLGQVEYIFSDKTGTLTQNILTFNKCCISGRVYGEPLPLEQVRRREAALPQCGPAAPRADQRGRGRAGVLAPAGHLPHGDDQLLYQAASPDEGALVTAARNFGYVFLSRTQDTVTIMELGEERVYQVLAIMDFNSTRKRMSVLVRKPEGAICLYTKGADTVIFERLHRRGAMEFATEEALAAFAQETLRTLCLAYREVAEDIYEDWQQRHQEASLLLQNRAQALQQVYNEMEQDLRLLGATAIEDRLQDGVPETIKCLKKSNIKIWVLTGDKQETAVNIGFACELLSENMLILEEKEISRILETYWENSNNLLTRESLSQVKLALVINGDFLDKLLVSLRKEPRALAQNVNMDEAWQELGQSRRDFLYARRLSLLCRRFGLPLAAPPAQDSRARRSSEVLQERAFVDLASKCQAVICCRVTPKQKALIVALVKKYHQVVTLAIGDGANDINMIKTADVGVGLAGQEGMQAVQNSDFVLGQFCFLQRLLLVHGRWSYVRICKFLRYFFYKSMASMMVQVWFACYNGFTGQDVSAEQSLEKPELYVVGQKDELFNYWVFVQAIAHGVTTSLVNFFMTLWISRDTAGPASFSDHQSFAVVVALSCLLSITMEVILIIKYWTALCVATILLSLGFYAIMTTTTQSFWLFRMPTSA

SEQ ID NO: 22742 - protein, 815 aa, Homo sapiens [sequence omitted]

SEQ ID NO: 22743 - protein, 797 aa, Homo sapiens
QRNLFLKAFTDFLAFMVLFNYIIPVSMYVTVEMQKFLGSYFITWDEDMFDEETGEGPLVNTSDLNEELGQVEYIFTDKTGTLTENNMEFKECCIEGHVYVPHVICNGQVLPESSGIDMIDSSPSVNGREREELFFRALCLCHTVQVKDDDSVDGPRKSPDGGKSCVYISSSPDEVALVEGVQRLGFTYLRLKDNYMEILNRENHIERFELLEILSFDSVRRRMSVIVKSATGEIYLFCKGADSSIFPRVIEGKVDQIRARVERNAVEGLRTLCVAYKRLIQEEYEGICKLLQAAKVALQDREKKLAEAYEQIEKDLTLLGATAVEDRLQEKAADTIEALQKAGIKVWVLTGDKMETAAATCYACKLFRRNTQLLELTTKRIEEQSLHDVLFELSKTVLRHSGSLTRDNLSGLSADMQDYGLIIDGAALSLIMKPREDGSSGNYRELFLEICRSCSAVLCCRMAPLQKAQIVKLIKFSKEHPITLAIGDGANDVSMILEAHVGIGVIGKEGRQAARNSDYAIPKFKHLKKMLLVHGHFYYIRISELVQYFFYKNVCFIFPQFLYQFFCGFSQQTLYDTAYLTLYNISFTSLPILLYSLMEQHVGIDVLKRDPTLYRDVAKNALLRWRVFIYWTLLGLFDALVFFFGAYFVFENTTVTSNGQIFGNWTFGTLVFTVMVFTVTLKLALDTHYWTWINHFVIWGSLLFYVVFSLLWGGVIWPFLNYQRMYYVFIQMLSSGPAWLAIVLLVTISLLPDVLKKVLCRQLWPTATERVQTKSQCLSVEQSTIFMLSQTSSSLSF

SEQ ID NO: 22744 - protein, 765 aa, Homo sapiens
ARGERPEPVDFSFNPLADKKFLFWDPSLLEAVKIGDPHTHEFFRLLSLCHTVMSEEKNEGELYYKAQSPDEGALVTAARNFGFVFRSRTPKTITVHEMGTAITYQLLAILDFNNIRKRMSVIVRNPEGKIRLYCKGADTILLDRLHHSTQELLNTTMDHLNEYAGEGLRTLVLAYKDLDEEYYEEWAERRLQASLAQDSREDRLASIYEEVENNMMLLGATAIEDKLQQGVPETIALLTLANIKIWVLTGDKQETAVNIGYSCKMLTDDMTEVFIVTGHTVLEVREELRKAREKMMDSSRSVGNGFTYQDKLSSSKLTSVLEAVAGEYALVINGHSLAHALEADMELEFLETACACKAVICCRVTPLQKAQVVELVKKYKKAVTLAIGDGANDVSMIKTAHIGVGISGQEGIQAVLASDYSFSQFKFLQRLLLVHGRWSYLRMCKFLCYFFYKNFAFTMVHFWFGFFCGFSAQTVYDQYFITLYNIVYTSLPVLAMGVFDQDVPEQRSMEYPKLYEPGQLNLLFNKREFFICIAQGIYTSVLMFFIPYGVFADATRDDGTQLADYQSFAVTVATSLVIVVSVQIGLDTGYWTAINHFFIWGSLAVYFAILFAMHSNGLFDMFPNQFRFVGNAQNTLAQPTVWLTIVLTTVVCIMPVVAFRFLRLNLKPDLSDTVRYTQLVRKKQKAQHRCMRRVGRTGSRRSGYAFSHQEGFGELIMSGKNMRLSSLALSSFTTRSSSSWIESLRRKKSDSASSPSGGADKPLKG

SEQ ID NO: 22745 - protein, 713 aa, Homo sapiens
MSEEKNEGELYYKAQSPDEGALVTAARNFGFVFRSRTPKTITVHEMGTAITYQLLAILDFNNIRKRMSVIVRNPEGKIRLYCKGADTILLDRLHHSTQELLNTTMDHLNEYAGEGLRTLVLAYKDLDEEYYEEWAERRLQASLAQDSREDRLASIYEEVENNMMLLGATAIEDKLQQGVPETIALLTLANIKIWVLTGDKQETAVNIGYSCKMLTDDMTEVFIVTGHTVLEVREELRKAREKMMDSSRSVGNGFTYQDKLSSSKLTSVLEAVAGEYALVINGHSLAHALEADMELEFLETACACKAVICCRVTPLQKAQVVELVKKYKKAVTLAIGDGANDVSMIKTAHIGVGISGQEGIQAVLASDYSFSQFKFLQRLLLVHGRWSYLRMCKFLCYFFYKNFAFTMVHFWFGFFCGFSAQTVYDQYFITLYNIVYTSLPVLAMGVFDQDVPEQRSMEYPKLYEPGQLNLLFNKREFFICIAQGIYTSVLMFFIPYGVFADATRDDGTQLADYQSFAVTVATSLVIVVSVQIGLDTGYWTAINHFFIWGSLAVYFAILFAMHSNGLFDMFPNQFRFVGNAQNTLAQPTVWLTIVLTTVVCIMPVVAFRFLRLNLKPDLSDTVRYTQLVRKKQKAQHRCMRRVGRTGSRRSGYAFSHQEGFGELIMSGKNMRLSSLALSSFTTRSSSSWIESLRRKKSDSASSPSGGADKPLKG

SEQ ID NO: 22746 - protein, 994 aa, Homo sapiens
MSRATSVGDQLEAPARTIYLNQPHLNKFRDNQISTAKYSVLTFLPRFLYEQIRRAANAFFLFIALLQQIPDVSPTGRYTTLVPLIIILTIAGIKEIVEDFKRHKADNAVNKKKTIVLRNGMWHTIMWKEVAVGDIVKVVNGQYLPADVVLLSSSEPQAMCYVETANLDGETNLKIRQGLSHTADMQTREVLMKLSGTIECEGPNRHLYDFTGNLNLDGKSLVALGPDQILLRGTQLRNTQWVFGIVVYTGHDTKLMQNSTKAPLKRSNVEKVTNVQILVLFGILLVMALVSSAGALYWNRSHGEKNWYIKKMDTTSDNFGYNLLTFIILYNNLIPISLLVTLEVVKYTQALFINWDTDMYYIGNDTPAMARTSNLNEELGQVKYLFSDKTGTLTCNIMNFKKCSIAGVTYGHFPELAREPSSDDFCRMPPPCSDSCDFDDPRLLKNIEDRHPTAPCIQEFLTLLAVCHTVVPEKDGDNIIYQASSPDEAALVKGAKKLGFVFTARTPFSVIIEAVSNMRVHFRSPAFVKIVCVKWHVYCKYDQATRAAITQHCTDLGNLLGKENDVALIIDGHTLKYALSFEVRRSFLDLALSCKAVICCRVSPLQKSEIVDVVKKRVKAITLAIGDGANDVGMIQTAHVGVGISGNEGMQATNNSDYAIAQFSYLEKLLLVHGAWSYNRVTKCILYCFYKNVVLYIIELWFAFVNGFSGQILFERWCIGLYNVIFTALPPFTLGIFERSCTQESMLRFPQLYKITQNGEGFNTKVFWGHCINALVHSLILFWFPMKALEHDTVFDSGHATDYLFVGNIVYTYVVVTVCLKAGLETTAWTKFSHLAVWGSMLTWLVFFGIYSTIWPTIPIAPDMRGQATMVLSSAHFWLGLFLVPTACLIEDVAWRAAKHTCKKTLLEEVQELETKSRVLGKAVLRDSNGKRLNERDRLIKRLGRKTPPTLFRGSSLQQGVPHGYAFSQEEHGAVSQEEVIRAYDTTKKKSRKK

SEQ ID NO: 22747 - protein, 914 aa, Homo sapiens
KNLLTKVRDAALWLETLSDSRPAKASLSTTSSIADFFLALTICNSVMVSTTTEPRQRVTIKPSSKALGTSLEKIQQLFQKLKLLSLSQSFSSTAPSDTDLGESLGANVATTDSDERDDASVCSGGDSTDDGGYRSSMWDQGDILESGSGTSLEEALEAPATDLARPEFCYEAESPDEAALVHAAHAYSFTLVSRTPEQVTVRLPQGTCLTFSLLCTLGFDSVRKRMSVVVRHPLTGEIVVYTKGADSVIMDLLEDPACVPDINMEKKLRKIRARTQKHLDLYARDGLRTLCIAKKVVSEEDFRRWASFRREAEASLDNRDELLMETAQHLENQLTLLGATGIEDRLQEGVPDTIATLREAGIQLWVLTGDKQETAVNIAHSCRLLNQTDTVYTINTENQETCESILNCALEELKQFRELQKPDRKLFGFRLPSKTPSITSEAVVPEAGLVIDGKTLNAIFQGKLEKKFLELTQYCRSVLCCRSTPLQKSMIVKLVRDKLRVMTLSIGDGANDVSMIQAADIGIGISGQEGMQAVMSSDFAITRFKHLKKLLLVHGHWCYSRLARMVVYYLYKNVCYVNLLFWYQFFCGFSSSTMIDYWQMIFFNLFFTSLPPLVFGVLDKDISAETLLALPELYKSGQNSECYNLSTFWISMVDAFYQSLICFFIPYLAYKGSDIDVFTFGTPINTISLTTILLHQAMEMKTWTIFHGVVLLGSFLMYFLVSLLYNATCVICNSPTNPYWVMEGQLSNPTFYLVCFLTPVVALLPRYFFLSLQGTCGKSLISKAQKIDKLPPDKRNLEIQSWRSRQRPAPVPEVARPTHHPVSSITGQDFSASTPKSSNPPKRKHVEESVLHEQRCGTECMRDDSCSGDSSAQLSSGEHLLGPNRIMAYSRGQTDMCRCSKRSSHRRSQSSLTI

SEQ ID NO: 22748 - protein, 1019 aa, Homo sapiens
MVFRRCTIMGSEYSHQENAKRLETPKELDSDGEEWTQYQCLSFSARWAQDPATMRSQKGAQPLRRSQSARVPIQGHYRQRSMGHRESSQPPVAFSSSIEKDVTPDKNLLTKVRDAALWLETLSDSRPAKASLSTTSSIADFFLALTICNSVMVSTTTEPRQRVTIKPSSKALGTSLEKIQQLFQKLKLLSLSQSFSSTAPSDTDLGESLGANVATTDSDERDDASVCSGGDSTDDGGYRSSMWDQGDILESGSGTSLEEALEAPATDLARPEFCYEAESPDEAALVHAAHAYSFTLVSRTPEQVTVRLPQGTCLTFSLLCTLGFDSVRKRMSVVVRHPLTGEIVVYTKGADSVIMDLLEDPACVPDINMEKKLRKIRARTQKHLDLYARDGLRTLCIAKKVVSEEDFRRWASFRREAEASLDNRDELLMETAQHLENQLTLLGATGIEDRLQEGVPDTIATLREAGIQLWVLTGDKQETAVNIAHSCRLLNQTDTVYTINTENQETCESILNCALEELKQFRELQKPDRKLFGFRLPSKTPSITSEAVVPEAGLVIDGKTLNAIFQGKLEKKFLELTQYCRSVLCCRSTPLQKSMIVKLVRDKLRVMTLSIGDGANDVSMIQAADIGIGISGQEGMQAVMSSDFAITRFKHLKKLLLVHGHWCYSRLARMVVYYLYKNVCYVNLLFWYQFFCGFSSSTMIDYWQMIFFNLFFTSLPPLVFGVLDKDISAETLLALPELYKSGQNSECYNLSTFWISMVDAFYQSLICFFIPYLAYKGSDIDVFTFGTPINTISLTTILLHQAMEMKTWTIFHGVVLLGSFLMYFLVSLLYNATCVICNSPTNPYWVMEGQLSNPTFYLVCFLTPVVALLPRYFFLSLQGTCGKSLISKAQKIDKLPPDKRNLEIQSWRSRQRPAPVPEVARPTHHPVSSITGQDFSASTPKSSNPPKRKHVEESVLHEQRCGTECMRDDSCSGDSSAQLSSGEHLLGPNRIMAYSRGQTDMCRCSKRSSHRRSQSSLTI

SEQ ID NO: 22749 - protein, 672 aa, Homo sapiens
DCTGDGPWQSNLAPSQLEYYASSPDEKALVEAAARIGIVFIGNSEETMEVKTLGKLERYKLLHILEFDSDRRRMSVIVQAPSGEKLLFAKGAESSILPKCIGGEIEKTRIHVDEFALKGLRTLCIAYRKFTSKEYEEIDKRIFEARTALQQREEKLAAVFQFIEKDLILLGATAVEDRLQDKVRETIEALRMAGIKVWVLTGDKHETAVSVSLSCGHFHRTMNILELINQKSDSECAEQLRQLARRITEDHVIQHGLVVDGTSLSLALREHEKLFMEVCRNCSAVLCCRMAPLQKAKVIRLIKISPEKPITLAVGDGANDVSMIQEAHVGIGIMGKEGRQAARNSDYAIARFKFLSKLLFVHGHFYYIRIATLVQYFFYKNVCFITPQFLYQFYCLFSQQTLYDSVYLTLYNICFTSLPILIYSLLEQHVDPHVLQNKPTLYRDISKNRLLSIKTFLYWTILGFSHAFIFFFGSYLLIGKDTSLLGNGQMFGNWTFGTLVFTVMVITVTVKMALETHFWTWINHLVTWGSIIFYFVFSLFYGGILWPFLGSQNMYFVFIQLLSSGSAWFAIILMVVTCLFLDIIKKVFDRHLHPTSTEKAQLTETNAGIKCLDSMCCFPEGEAACASVGRMLERVIGRCSPTHISRSWSASDPFYTNDRSILTLSTMDSSTC

SEQ ID NO: 22750 - protein, 1149 aa, Bos taurus
MPTMRRTVSEIRSRAEGYEKTDDVSEKTSLADQEEIRTIFINQPQLTKFCNNHVSTAKYNIITFLPRFLYSQFRRAANSFFLFIALLQQIPDVSPTGRYTTLVPLLFILAVAAIKEIIEDIKRHKADNAVNKKQTQVLRNGAWEIVHWEKVNVGDIVIIKGKEYIPADTVLLSSSEPQAMCYIETSNLDGETNLKIRQGLPATSDIKDIDSLMRLSGRIECESPNRHLYDFVGNIRLDGRSTVPLGADQILLRGAQLRNTQWVHGIVVYTGHDTKLMQNSTSPPLKLSNVERITNVQILILFCILIAMSLVCSVGSAIWNRRHSGRDWYLNLNYGGANNFGLNFLTFIILFNNLIPISLLVTLEVVKFTQAYFINWDLDMHYEPTDTAAMARTSNLNVELGQVKYIFSDKTGTLTCNVMQFKKCTIAGVAYGQNSQFGDEKTFSDSSLLENLQNNHPTAPIICEFLTMMAVCHTAVPEREGDKIIYQAASPDEGALVRAAKQLNFVFTGRTPDSVIIDSLGQEERYELLNVLEFTSARKRMSVIVRTPSGKLRLYCKGADTVIYDRLAETSKYKEITLKHLEQFATEGLRTLCFAVAEISESDFQEWRAVYHRASTSVQNRLLKLEESYELIEKNLQLLGATAIEDKLQDQVPETIETLMKADIKIWILTGDKQETAINIGHSCKLRRKNMGMIVINEGSLDGTRETLSRHCTTLGDALRKENDFALIIDGKTLKYALTFGVRQYFLDLALSCKAVICCRVSPLQKSEVVEMVKKQVKVITLAIGDGANDVSMIQTAHVGVGISGNEGLQAANSSDYSIAQFKYLKNLLMVHGAWNYNRGSKCILYCFYKNIVLYIIEIWFAFVNGFSGQILFERWCIGLYNVMFTAMPPLTLGIFERSCRKEYMLKYPELYKTSQNALDFNTKVFWVHCLNGLFHSVILFWFPLKALQYGTVFENGRTSDYLLLGNFVYTFVVITVCLKAGLETSYWTWFSHIAIWGSIALWVVFFGIYSSLWPAVPMAPDMSGEAAMLFSSGVFWMGLLFIPVASLLLDVVYKVIKRTAFKTLVDEVQELEAKSQDPGAVVLGKSLTERAQLLKNVFKKNHVNLYRSESLQQNLLHGYAFSQDENGIVSQSEVIRAYDTTKQRPDEW

SEQ ID NO: 22751 - protein, 1107 aa, Oryctolagus cuniculus
LGFDPPHQSDTRTIYIANRFPQNGLYTPQKFIDNRIISSKYTVWNFVPKNLFEQFRRVANFYFLIIFLVQLMIDTPTSPITSGLPLFFVITVTAIKQGYEDWLRHNSDNEVNGAPVYVVRSGGLVKTRSKNIRGMHLVGDIVRIAKDEIFPADLVLLSSDRLDGSCHVTTASLDGETNLKTHVAVPETAVLQTVANLDTLVAVIECQQPEADLYRFMGRMVITQQMEEIVRPLGPESLLLRGARLKNTKEIFGVAVYTGMETKMALNYKSKSQKRSAVEKSMNTFLTIYLIILISEAIISTILKYTWQAEEKWDEPWYNQKTEHQRNSSKVEYVFTDKTGTLTENEMQFRECSIHGMKYQEINGRLVPEGPTPDSSEGNLSYLSSLSHVNSLSHLTSSSSFRTSPENDTELIKEHDLFFKAVSLCHTVQISSVQTDGIGDGPWQSSLAPSQLEYYASSPDEKALVEAAARIGIVFVGNTEETMEVKILGKLERYKLLHVLEFDSDRRRMSVIVQAPSGERFLFAKGAESSILPKCIGGEIEKTRIHVDEFALKGLRTLCVAYRQFTSKEYEVIDRRLFEARTALQQREEKLADVFHYIEKDLILLGATAVEDRLQDKVRETIEALRMAGIKVWVLTGDKHETAVSVSLSCGHFHRTMNILELTNQKSDSECAEQLRQLARRITEDHVIQHGLVVDGTSLSLALREHEKLFMEVCRNCSAVLCCRMAPLQKAKVIRLIKISPEKPITIGCWDGANDVSMIQEAHVGIGIMGKERRQAARNSDYAIARFKFLSKLLFVHGHFYYIRIATLVQYFFYKNVCFITPQFLYQFYCLFSQQTLYDSVYLTLYNICFTSLPILIYSLLEQHIDPHILQNKPTLYRDISKNRLLSIKTFLYWTILGFSRSFIFLFGSYFLIGKDASLLGNGQMFGNWTFGTLVFTVMVITVTVKMALETHFWTWINHLVTWGSIIFYFVFSLFYGGILWPFLGSQNMYFVFIQLVSSGSAWFAIILMVVTCLFLDVMKKVFDRQLHPTSTEKAQLTETNSSIKCVDSLCCFPEGETTCTSVRRMLERVIGRCSPTHISRSWSASDPFYTNDRSILTLSTMDSSTC

SEQ ID NO: 22752 - protein, 341 aa, Oryctolagus cuniculus
QGYEDWLRHNSDNEVNGAPVYVVRSGGLVKTRSKNIRVGDIVRIAKDEIFPADLVLLSSDRLDGSCHVTTASLDGETNLKTHVAVPETAVLQTVANLDTLVAVIECQQPEADLYRFMGRMIITQQMEEIVRPLGPESLLLRGARLKNTKEIFGVAVYTGMETKMALNYKSKSQKRSAVEKSMNTFLIIYLIILISEAIISTISKYTWQAEEKWDEPWYNQKTEHQRNSSKILRFISDFLAFLVLYNFIIPISLYVTVEMQKFLGSFFIGWDLDLYHEESDQKAQVNTSDLNEELGQVEYVFTDKTGTLTENEMQFRECSIHGMKYQEINGRLVPEGPTPDS

SEQ ID NO: 22753 - protein, 195 aa, Glycine max
  unsure (1)..(195): unsure at all Xaa locations
XVPLLLIHGHWNYQRLGYMIIYNFYRNAIFVLVLFWYVLFTALGLTTAINEWSSVLYSIIYSAFPTIVVGILDKDLSKRTLLKYPQLYGAGLRQEAYNKKLFWLAMADTLWQSIAVFFTPLIAYWGTTVDVTSIGDLWTLSVAILVYLHLAMDVIRWDWITHAAIWGSIVATFIWGIIIDAIPSPSGYLYVLSFP

SEQ ID NO: 22754 - protein, 128 aa, Glycine max
  unsure (1)..(128): unsure at all Xaa locations
XSICHTAIPEVDEDTGEVSYETESPDEAAFVIAAREIGFEFYKRTQTSLSMYELDPVSGDKIERMYKLLNVLEFNSSRKRMSVIVKDEKGRIFLLCKSADSVMFERLAKDGREFEEKTLEHVHEYADX

SEQ ID NO: 22755 - protein, 242 aa, Triticum aestivum
  unsure (1)..(242): unsure at all Xaa locations
XYFEAFAGFSGQSVKHARFMLHHNVYFWDVLXWCVAFCYAVCGIIFTLQFPALYQQGPNNLFFDWYRILGWMANGLYSSLAIFFLNICIFYDQAIRSGGQTADMASVGTTMFSCIIWAVNIQIALTMSHFTWIQHLFVWGSIGTWYVFIITYGMALKSRDNFQIMTEVLGPAPIYWAATLLVTAACNIPYLIHISYQRSCNPLDHHVIQEIKYLRKDVEXRNNWKRERSKARQRSKLPSXPH

SEQ ID NO: 22756 - protein, 135 aa, Triticum aestivum
  unsure (1)..(135): unsure at all Xaa locations
AKTVLMSWIHSSGRXFGEETRSQQNVYCDSGLRTFFLVXHVLDEKGRENFNEYFSTAXXDADKDEKXHEVADNIECDLLXGATAAEDKLQKKVLECIEKLPQAGIKFCVLTXDKMXXAINIGYQIVXLDDDGTNX

SEQ ID NO: 22757 - protein, 137 aa, Triticum aestivum
  unsure (1)..(137): unsure at all Xaa locations
FPALYQQGPKNLFFDWYRILGWMGNGLYSSLAIFFLNLCIFYDQAIRAGGQTADMAAVGTAMFTCIIWAVNMQIALTMSHFTWIQHLFVWGSITTWYIFILAYGMXXLRSRDNYQILLEVLGPAPIYWAATLLVTAX

SEQ ID NO: 22758 - protein, 146 aa, Zea mays
  unsure (1)..(146): unsure at all Xaa locations
XACLQASKDSVARQINEGKKLVNASSGESFALIIDGRSLTYALEDDAKDMFLDLAVGCGSVICCRSSPKQKALVTRLVKTGTGKVTLAIGDGANDVGMIQEADIGVGISGAEGMQXXVAATTSLVLXSRRNQLWIVFISWSMLCSA

SEQ ID NO: 22759 - protein, 112 aa, Zea mays
  unsure (1)..(112): unsure at all Xaa locations
XACLQDGVPEAIEKLREAGIKVWVLTGDKQETAISIGYSCKLLTRDMTQIVINSRSRESCRKSLEDAIAMLFEIAIACDVVLCCRVAPLQKAGIVDLIKKRTSDMTLAIGDX

SEQ ID NO: 22760 - protein, 1355 aa, Saccharomyces cerevisiae; identical to SEQ ID NO: 620

SEQ ID NO: 22761 - protein, 1073 aa, Debaryomyces hansenii
MSYSSASSELEKKNDQMKDGFQPYRMSIEEVTAYFDTDIENGLTSSQAKTVYDIKGGNNLGDDDKISYSKIFAHQMFNAMILVLIISMVIALAIRDWITGGVIGFVVFINILVGFVQELKAEKTMGSLRSLSSPTAFVLRNGDDVTIPADEVVPGDIVHIKVGDTVPADLRLIDTMNLESDEALLTGESLPTGKGPQRDLSDRSVPIPVGDRLNMAFSPSGGSKGRGVGIAVATGLDTEIGTIAQSLRGNDGLIRKVDKSNDRKPKKREYSFAFFGTCKDICLNILGVNVGTPLQRKLSLLAIFLFCVAVIFAIVVMGSQRMIVNREVAIYAICVALSMIPSALIVVLTITMAVGAQVMVLKNVIVRKLDSLEALGGINDICSDKTGTLTQGKMIAKRVWIPNVGTYSVDNLNEPYNPTVGDMSFTKYSPRYAKDADEEINFLPYLPDQPKNFENWLYTATLANIATINQAQDEDSGELVWKAHGDATEIAIQVFTTRLDYARVSLQGNYEHISEYPFDSTIKRMSAVYKSKENGETRVYTKGAVERILGICTHWLGHSDNYEEDYDANYDNSKPIEMTDDDRALIEDNMNALSSQGLRVLAFATRNATDSKDDLSDREQVEKDLTFQGLIGIYDPPRIETADSVKKCHKAGINVHMLTGDHPGTAKAIAQEVGILPHNLYHYSDEVVKSMCMTATQFDGLTDEEIDNLPVLPLVIARCAPQTKVRMIDALHRRKKFVAMTGDGVNDSPSLKKADVGIAMGLNGSDVAKDASDIVLTDDNFASILNAIEEGRRMSTNIQKFVLQLLAENVAQAIYFMVGLVFIDDSGFSVFPLSPIEVLWVLVITSWFPAMGLGQEKASDDILEKPPNSTIFTWEVIIDMLAYGLFMAISCKCCFVIIVYGVGDGYLGIDCNASDTHCDLVFRARSGSFATMTWCALIMAWECVHQENSLFYMRRDTDNPWWKQTAIDLWGNQFLFWSVIVGFVTVFPVVYIPVINNDVFLHKGIGYEWGIAIGFSLFFLLSSETWKWMKRIYKRKQAKKVVNPEYDLERNDPFEKYASFSRSNTFDKNTVLV

SEQ ID NO: 22762 - protein, 1528 aa, Cryptosporidium parvum
MIGSDDSFEPNIQNQTVQSSMATKSSNTFHSIFNKDEKLLEMSSQSSLKDVNSYSPNIATYNCIGNNSSPSSRIVSPISSASFFVDMTPNGRHLLHAEVADEEPNPETCSPNPQKFLQNRLNLLASRNLLNHYVNSNENNYFGKQLSSDVISSIPDLQYNETAVQDMVINKLSMSTQMLPDTIEEARKRDPEFVSKALEQTLEYSEAQKPIHYWSQIELDMLINELSANIIDGIDEGKAIELMEKKYGPNKLQKEKHEPIWRIFLSQFTSLVVSLLLVAGIVSLAFQEWVEGIGILFIVLINASLATYMENNASNALAKLADLSSPKCTVIRSGIINIIPAYNLIPGDIVLLRTGDSVPADVRLIEATEIKCNEALLTGESEDVSKHLVSPDPNNPFPTNICFASTAITNGTGKAIVVLTGMNTQIGRIAQQLKLASGGSNSGTPLQIGLNRLGGFIGFMSLIVLVIIVIVALLTNYKDPSHPNSNPVFGIILVAVGFAVSSIPEGLPMVVTICLSIGCSEMCRRKANIRKLPAVETLGCCSVICSDKTGTLTEGKMTAVKLATFSRNNTKTLNISPTGNEQSPSFVEYQESNSCVFSFYPTRGSDPNGGIFLSSSLTQNIKEEIMNLIHFNKNKTIEMTENHFLESNFEMPPDDKIPYKFINYNSICKDFGDPLNSHLPQTKYVRSALLAGYLNSYGTALVYDNESNSWKTRGNMSEGAIVVAAAKASYGIKNKIFDSRKQDIESKQSSTKKSGHLIRSKLNDQNFKTINNGNNPATEVATSGSSPTQCALDSNSTDSNKLKNYIIDGVNTENKTNLVIEDEIEYLRVPSVEVPFTSSRKMMMTVHSLSTPNKFGDIFFSNTDSKSNKQTNLQNKVSNSNSQRYSKTVDNLDSGVYTHVAILKGAPDRIVKHIGFMLNTDWKNEEPMVHIDYSEKINPQEIFEIENTNKVLSGEALRVLGIAILPLTSEDFFDLVTEECSDKRLQYVLDKNELTLLGLIGFLDPPRPGVEKAITKCCEAGVRVIMITGDQQPTACAIARSIGLLADEYEYKNSYEGSADLHNATSGSIICNQLHENGDASRPHLSNELFDKIVSSVSVFCRAQPEDKIAIVRSLQRQGEVVAMTGDGVNDAPALKAADIGVAMGISGTEVAKGASEMVLLDDNFVTIVNAIEEGRKIYSNVQKFVAFLLGTNIGEIIYLSIAIAAQLPIPIAALQILFLNLMSDGGPAVALSVDPPDPNMMKVPPRPKKSPIMTRDWWIFGNIPHAIFEAICVLSVLIISMYTSLGVFQRNAIESLCLHDSNNRYFCQTNEWRLNLIDLEKTGWVTNIDFYNPLTNSMEQILGVTKGKLNSTLPPSEIPYVKGLYEKAERLGISCVAGKHGWCIPQQKITNDEYIDLVAFGTIRGRTASFIAAVFCEMLRAYTVRTWDWFTKPLFNNPWLHFACSLSASSTLIVTFTPGLQQIFGTHTIYWWLYILAIGAGFLNMAFDELVPKPLYRRIVERRRIRAKLLAERDVNWITRSEQFENT

SEQ ID NO: 22763 - protein, 362 aa, Tetrahymena thermophila
CSDKTGTLTTNEMSVEKFFVAGNKDGSQLAAFEVKGHSYSPEGEIVNFQNFNGSQLAKNIKTFATSMVLNNESKLIFDKNRVNRSGLPTEAAIKVLSEKIGKYDPDFKNKYVPISTGHVEQYGSYLAQDYEKRATLEFSRDRKSMSVLLKCKNVLFIKGAPDYLLKASKKIMNKDGEVVDFTAATKTAFENQIKEYAKAGLRTLAICVKYDTGALVDYTGPSHPAHKQLEDSNNYAKIEEDPIIIGVVAVRDPPRPEVAASIQKCKQAGISVIMITGDIKETAESIARDIGIIQAGDEEFRSLTGHTFENLSEEKQLEYLQQVIDAPSGFVFSRTDPRHKRALVKILSGQNQIVAMTGDGVN

SEQ ID NO: 22764 - protein, 1031 aa, Hydra vulgaris
MADPGDLESRGKADSYSVAEKKSAPKKISKKNANKAKLEDLKKELEMTEHSMKLESLLSMYETSLEKGLSENIVARNLERDGLNALTPPKQTPEWVKFCKQMFGGFSMLLWIGAILCFFAFGIRAVRDTNPNMDELYLGIVLSVVVIITGCFSYYQESKSSKIMESFKKMIPQEALVLRDGKKITINAEQCVVGDVVFVKFGDRIPADIRIVECKGLKVDNSSLTGESEPQSRAVDFTHENPIETKNLAFFSTNAVEGTATGIVVRIGDNTVMGRIANLASGLGSGKTPIALEIEHFIHIVTGVAVFLGVSFLIISLAMGYHWLEAIIFLIGIIVANVPEGLLATVTVCLTLTAKKMAKKNCLVKHLEAVETLGSTSVICSDKTGTLTQNRMTVAHMWFDKMIVEADTTEDQSGIAHDKGSLTWKSLAKVAALCSRAEFKPNQNDVAVLRKECTGDASETAILKFVELSVGNVMDIRAKNKKVTEIPFNSTNKYQVSVHEQENSSGYLLVMKGAPEKVLERCSTILINGEEQPLKDDVIEIYNKAYDELGGLGERVLGFCHYYLPVDQYPKGFLFKTEEEQNFPLEGLCFLGLLSMIDPPRAAVPDAVSKCRSAGIKVIMVTGDHPITAKAIAKGVGIISEGNECEEDIALRLNIPLEDLSEDQKKSAKACVIHGAKLKDIKNEELDKILCDHTEIVFARTSPQQKLIIVEGCQRQGAIVAVTGDGVNDSPALKKADIGVAMGIAGSDVSKQAADMILLDDNFASIVTGVEEGRLIFDNLKKSIVYTLTSNIPEISPFLMFILFGIPLPLGTITILCIDLGTDMVPAISLAYEKAESDIMKRHPRNPIRDKLVNERLISLAYGQIGMMQATAGFFTYFIILAENGFLPSYLFGLRSQWDDMSNNNLLDSFGSEWTYFQRKEIELTCQTAFFTTIVVVQWADLIISKTRRLSLFQQGMTNWFLNFGLFFETALAAFLQYTPGVNTGLRLRPMNFTWWLPGLPFSLLIFVYDEIRRYLLRKNPGGWVEKETYY

SEQ ID NO: 22765 - protein, 1022 aa, Dugesia japonica
MASDEKVNDKGDLKNLKGSPKKSKKDKKKDLDNLKKELDIDSHRIPIKDLYIRLQSDPDKGISYEDAKMRLARDGPNALTPPKTTPEWVKFCKQLFGGFSLLLWIGAVLCFLAYAIQSGAYEDPPKDNLYLGVVLTAVVVITGCFSYYQDAKSSKIMESFGKMVPQKANVIREGKISEISAENLVVGDVIEVKFGDRVPADIRVIQASSFKVDNSALTGESEAQVRTPEFTNDNPLETKNIAFFSTNAVEGTCRGIVISVGDNTVMGRIANLASGLEMGMTPIAKEINHFIHIITGVAVFLGVSFFVIAFILGYFWLDAVIFLIGIIVANVPEGLLATVTVCLTLTAKRMAKKNCLVKNLEAVETLGSTSTICSDKTGTLTQNRMTVAHMWFDNKIQESDTSENQITSSSKQESDTWKMLARISMLCNRAQFKAGEEDKPVLKRDCTGDASESALLKCVELSIGGVTKYREENKKIVEIPFNSTNKYQVSIHETNDGNPGYLIAMKGAPERILERCSTILIDGKEVHMDDHWKQEFNNAYLELGGMGERVLGFCDFRLDENEFPKGFKFNPDEVNFPLDGLRFVGLMSMIDPPRAAVPDAVAKCRSAGIKVIMVTGDHPITAKAIAKGVGIISEGNRTVDDIAAERGISPSEVNPRDARACVIHGSDLRDMTSEQLDEVLKHHDEIVFARTSPQQKLIIVEGCQRQGAIVAVTGDGVNDSPALKKADIGVAMGIAGSDVSKQAADMILLDDNFASIVTGVEEGRIIFDNLKKSIAYTLTSNIPEITPFLVFILADVPLPLGTITILCIDLGTDMVPAISLAYEEAESDIMKRKPRDPKHDKLVNERLISMAYGQIGMIQASGGFFVYFVIMAEQGFWPSRLLGLRKEWDSAAVNDLADSYGQEWTFEQRKKLEYTCHTAFFVSIVIVQWTDLMICKTRRNSIFQQGMWNHQMTFGLFFETTLAAFLTYCPGLDVALKMQPLRFTWWLPAIPFSASIFIYDEVRKYLLRKWKNGSWLENETYY

SEQ ID NO: 22766 - protein, 1039 aa, Callinectes sapidus
MADTGRTDSYRHATDRNIPDDNRTVKGDPKSKKKNVKGKRKGEKEKDMDNLKQELELDEHKVPIEELFQRLSVNPDTGLTQAEARRRLERDGPNALTPPKQTPEWVKFCKNLFGGFSLLLWIGAILCFIAYSIEAASEEEPNNDNLYLGIVLTAVVIITGIFSYYQESKSSRIMESFKNLVPQYAIVIREGEKLNVQAEELCIGDIIDVKFGDRIPADMRVIEARGFKVDNSSLTGESEPQSRSPEFTSENPLETKNLAFFSTNAVEGTCKGIVINIGDNTVMGRIAGLASGLETGETPIAKEISHFIHIITGVAVFLGVTFFVIAFIMGYHWLDAVVFLIGIIVANVPEGLLATVTVCLTLTAKRMAAKNCLVKNLEAVETLGSTSTICSDKTGTLTQNRMTVAHMWFDNTIIEADTSEDQSGCQYDKTSDGWKALSRIAALCNRAEFKTGQEDVPILKREVNGDASEAALLKCVELAIGDVRGWRSRNKKVCEIPFNSTNKYQVSIHETQDKNDLRYLLVMKGAPERILERCSTIFMNGEEKPLDEEMKESFNNAYLELGGLGERVLGFCDYVLPSDKYPLGYPFDADAVNFPVHGLRFVGLMSMIDPPRAAVPDAVAKCRSAGIKVIMVTGDHPITAKAIAKSVGIISEGNETVEDIAQRLNIPIKEVDPREAKAAVVHGSELRDMTSEQLDDVLIHHTEIVFARTSPQQKLIIVEGCQRMGAIVAVTGDGVNDSPALKKADIGVAMGIAGSDVSKQAADMILLDDNFASIVTGVEEGRLIFDNLKKSIAYTLTSNIPEISPFLFFMIASVPLPLGTVTILCIDLGTDMVPAISLAYEEAESDIMKRQPRNPFTDKLVNERLISMAYGQIGMIQALAGFYVYFVIMAENGFLPPVLFGIREQWDSKAINDLEDYYGQEWTYHDRKILEYTCHTAFFVAIVVVQWADLIICKTRRNSILHQGMKNMVLNFGLCFETTLAAFLSYTPGMDKGLRMYPLKFYWWLPPLPFSLLIFVYDECRRFVLRRNPGGWVEMETYY

SEQ ID NO: 22767 - protein, 1037 aa, Ctenocephalides felis
MDDKHGRSDSYRVATVPTIDDNLTADGQYKSRRKTPTKKQRKEGELDDLKQELDIDFHKVSPEELYQRFNTHPENGLSHAKAKENLERDGPNALTPPKQTPEWVKFCKNLFGGFALLLWIGAILCFVAYSIQASTVEEPADDNLYLGIVLAAVVIVTGIFSYYQESKSSKIMESFKNMVPQFATVLREGEKLTLRAEDLVLGDVVEVKFGSRIPADIRIIESRGFKVDKSSLTGESEPQSRGPEFTNEKPLETKNLAFFSINAVEGTAKGVVISCGDNTVMGRIAGLASGLDTGETPIAKEIHHFIHLITGVAVFLGVTFFVIAIILNYHWLDAVIFLIGIIVANVPEGLLATVTVCLTLTAKRMASKNCLVKNLEAVETLGSTSTICSDKTGTLTQNRMTVAHMWFDNQIIEADTTEDQSGVVYDRTSPGFKALARIATLCNRAEFKGGQEGVPILKKEVSGDASEAALLKCMELALGDVMSIRKRNKKVCEIPFNSTNKYQVSIHETEDASDPRHVMVMKGAPERILEKCSTIFIGGKEKLLDEEMKEAFNNAYLELGGLGERVLGFCDLMLPTDKFPLGFKFDSDDPNFPIENLRFVGLMSMIDPPRAAVPDAVAKCRSAGIKVIMVTGDHPITAKAIAKSVGIISEGNETVEDIAQRLNIPVSEVNPREAKAAVVHGTELRELNSDQLDEILRYHTEIVFARTSPQQKLIIVEGCQRMGAIVAVTGDGVNDSPALKKADIGVAMGIAGSDVSKQAADMILLDDNFASIVTGVEEGRLIFDNLKKSIAYTLTSNIPEISPFLAFILCDIPLPLGTVTILCIDLGTDMVPAISLAYEHAEADIMKRPPRDPVNDKLVNSRLISMAYGQIGMIQAAAGFFVYFVIMAENGFLPMKLFGIRKQWDSKAVNDLTDSYGQEWTYRDRKTLEYTCHTAFFVSIVVVQWADLIVCKTRRNSLLHQGMRNWALNFGLVFETALAAFLSYTPGMDKGLRMFPLKFVWWLPALPFMISIFIYDETRRFYLRRNPGGWLEQETYY

SEQ ID NO: 22768 - protein, 1022 aa, Torpedo californica
MGKGAASEKYQPAATSENAKNSKKSKSKTTDLDELKKEVSLDDHKLNLDELHQKYGTDLTQGLTPARAKEILARDGPNALTPPPTTPEWIKFCRQLFGGFSILLWTGAILCFLAYGIQVATVDNPANDNLYLGVVLSTVVIITGCFSYYQEAKSSKIMDSFKNMVPQQALVIRDGEKSSINAEQVVVGDLVEVKGGDRIPADLRIISACSCKVDNSSLTGESEPQSRSPEYSSENPLETKNIAFFSTNCVEGTARGIVINIGDHTVMGRIATLASGLEVGQTPIAAEIEHFIHIITGVAVFLGVSFFILSLILGYTWLEAVIFLIGIIVANVPEGLLATVTVCLTLTAKRMARKNCLVKNLEAVETLGSTSTICSDKTGTLTQNRMTVAHMWFDNQIHEADTTENQSGISFDKTSLSWNALSRIAALCNRAVFQAGQDSVPILKRSVAGDASESALLKCIELCCGSVSQMRDRNPKIVEIPFNSTNKYQLSIHENDKADSRYLLVMKGAPERILDRCSTILLNGEDKPLNEEMKEAFQNAYLELGGLGERVLGFCHLKLSTSKFPEGYPFDVEEPNFPITDLCFVGLMSMIDPPRAAVPDAVGKCRSAGIKVIMVTGDHPITAKAIAKGVGIISEGNETVEDIAARLNIPVNQVNPRDAKACVVHGTDLKDLSHENLDDILHYHTEIVFARTSPQQKLIIVEGCQRQGAIVAVTGDGVNDSPALKKADIGVAMGIAGSDVSKQAADMILLDDNFASIVTGVEEGRLIFDNLKKSIAYTLTSNIPEITPFLVFIIANVPLPLGTVTILCIDLGTDMVPAISLAYERAESDIMKRQPRNPKTDKLVNERLISMAYGQIGMIQALGGFFSYFVILAENGFLPIDLIGIREKWDELWTQDLEDSYGQQWTYEQRKIVEYTCHTSFFVSIVIVQWADLIICKTRRNSIFQQGMKNKILIFGLFEETALAAFLSYTPGTDIALRMYPLKPSWWFCAFPYSLIIFLYDEARRFILRRNPGGWVEQETYY

SEQ ID NO: 22769 - protein, 1009 aa, Electrophorus electricus
MGKGFGRGSSSDEKKKDLDELKKEVALDDHKLSLTDLASRYGVDLNKGLTTKRAAEILERDGPNALTPPPTTPEWVKFCKQLFGGFSILLWIGAILCFFAYSIQVASEDEPVNDNLYLGVVLAAVVIITGCFSYYQESKSSRIMDSFKNMVPQQAMVIRDGEKRQINAEDVVAGDLVEIKGGDRILADVRFISCSGCKVDNSSLTGESEPQSRSPDFTHENPLETKNICFFSTNCVEGTGRGIVIATGDRTVMGRIATLASGLEVGQTPINIEIEHFIHIITAVAVVLGVAFFFLSLVLGYTWLEAVIFLIGIIVANVPEGLLATVTVCLTLTAKRMARKNCLVKNLEAVETLGSTSTICSDKTGTLTQNRMTVAHMWFDNQIQVADTTEDQSGCGAFDKTSPSWKALSRVAGLCNRADFLPGQESVPILKRDTAGDASESALLKCIELSCGSVRSLREKNNKVAEIPFNSTNKFQLSIHEIEESPTGHILVMKGAPERILDRCSSIMISGQDIPLNDEWTNAFQRAYMELGGLGERVLGFCHLNLPPSQFPRGFAFDSEDVNFPTEQMCFLGLMSMIDPPRAAVPDAVGKCRSAGIKVIMVTGDHPITAKAIAKGVGIISEGNETVEDIAERLQVPLSQVNPRDAKACVVHGSDLKDMTSEFLDDLLRNHTEIVFARTSPQQKLIIVEGCQRQGAIVAVTGDGVNDSPALKRADIGIAMGIAGSDVSKQAADMILLDDNFASIVTGVEEGRLIFDNLKKSIAYTLTSNIPEISPFLFFIIASVPLPLGTVTILCIDLGTDMVPAISLAYESAESDIMKRQPRNPKTDKLVNERLISIAYGQIGMIQALAGFFTYFVVLAENGFLPRGLLGLRVDWDSRDVNDIEDSYGQQWTYEQRKIVEFTCHTSFFVSIVVVQWADLIICKTRRNSVFQQGMRNKILIFGLFAETALAAFLSYCPGMDVALRMYPLKLFWWFCALPYSLLIFVYDEVRKLILRRYPGGWVEKETYY

SEQ ID NO: 22770 - protein, 513 aa, Pseudopleuronectes americanus
ERILERCSTILIKGQELPLDEQWKEAFQTAYMDLGGLGERVLGFCHIYLNEKEFPRGYSFDPDEMNFTTSGLCFAGLISMIDPPRATVPDAVMKCRTAGIRVIMVTGDHPITARAIAANVGIISEGSETVEDIAQRKRIPVEQVNKRDARACVISGGQLKDMSSNELDETLKNHPEMVFARTSPQQKLIIVESCQRLGSIVAVTGDGVNDSPALKKADIGIAMGIAGSDAAKNAADMILLDDNFASIVTGVEQGRLIFDNLKKSIAYTLTKNIPELTPYLVYITVSVPLPLGCITILFIELATDIYPSVSLAYEKAESDIMHLKPRNPRRDRLVNEPLAAYSYFQIGAIQSFAGFTDYFAAMAQEGWFPLLCVGLRAQWEDVHLQDLQDSYGQEWTFSQRLYQQYTCYTVFFVSIEICQISDVLIRKTRRLSVFQQGFFRNRVLVSAIVFQLLLGNLLCYCPGMPNIFNFMPIRVQWWFIPVPFGILIFVYDEIRKLGVRRYPGSWWDQELYY

SEQ ID NO: 22771 - protein, 1426 aa, Homo sapiens
MTEALQWARYHWRRLIRGATRDDDSGPYNYSSLLACGRKSSQTPKLSGRHRIVVPHIQPFKDEYEKFSGAYVNNRIRTTKYTLLNFVPRNLFEQFHRAANLYFLFLVVLNWVPLVEAFQKEITMLPLVVVLTIIAIKDGLEGYRKYKIDKQINNLITKVYSRKEKKYIDRCWKDVTVGDFIRLSCNEVIPADMVLLFSTDPDGICHIETSGLDGESNLKQRQVVRGYAEQDSEVDPEKFSSRIECESPNNDLSRFRGFLEHSNKERVGLSKENLLLRGCTIRNTEAVVGIVVYAGHETKAMLNNSGPRYKRSKLERRANTDVLWCVMLLVIMCLTGAVGHGIWLSRYEKMHFFNVPEPDGHIISPLLAGFYMFWTMIILLQVLIPISLYVSIEIVKLGQIYFIQSDVDFYNEKMDSIVQCRALNIAEDLGQIQYLFSDKTGTLTENKMVFRRCSVAGFDYCHEENARRLESYQEAVSEDEDFIDTVSGSLSNMAKPRAPSCRTVHNGPLGNKPSNHLAGSSFTLGSGEGASEVPHSRQAAFSSPIETDVVPDTRLLDKFSQITPRLFMPLDETIQNPPMETLYIIDFFIALAICNTVVVSAPNQPRQKIRHPSLGGLPIKSLEEIKSLFQRWSVRRSSSPSLNSGKEPSSGVPNAFVSRLPLFSRMKPASPVEEEVSQVCESPQCSSSSACCTETEKQHGDAGLLNGKAESLPGQPLACNLCYEAESPDEAALVYAARAYQCTLRSRTPEQVMVDFAALGPLTFQLLHILPFDSVRKRMSVVVRHPLSNQVVVYTKGADSVIMELLSVASPDGASLEKQQMIVREKTQKHLDDYAKQGLRTLCIAKKVMSDTEYAEWLRNHFLAETSIDNREELLLESAMRLENKLTLLGATGIEDRLQEGVPESIEALHKAGIKIWMLTGDKQETAVNIAYACKLLEPDDKLFILNTQSKDACGMLMSTILKELQKKTQALPEQVSLSEDLLQPPVPRDSGLRAGLIITGRTLEFALQESLQKQFLELTSWCQAVVCCRATPLQKSEVVKLVRSHLQVMTLAIGDGANDVSMIQVADIGIGVSGQEGMQAVMASDFAVYQFKHLSKLLLVHGHWCYTRLSNMILYFFYKNVAYVNLLFWYQFFCGFSGTSMTDYWVLIFFNLLFTSAPPVIYGVLEKDVSAETLMQLPELYRSGQKSEAYLPHTFWITLLDAFYQSLVCFFVPYFTYQGSDTDIFAFGNPLNTAALFIVLLHLVIESKSLTWIHLLVIIGSILSYFLFAIVFGAMCVTCNPPSNPYWIMQEHMLDPVFYLVCILTTSIALLPRFVYRVLQGSLFPSPILRAKHFDRLTPEERTKALKKWRGAGKMNQVTSKYANQSAGKSGRRPMPGPSAVFAMKSASSCAIEQGNLSLCETALDQGYSETKAFEMAGPSKGKES

SEQ ID NO: 22772 - protein, 1158 aa, Arabidopsis thaliana
MDPRKSIDKPPHHDPILGVSSRWSVSSKDNKEVTFGDLGSKRIRHGSAGADSEMLSMSQKEIKDEDARLIYINDPDRTNERFEFTGNSIKTAKYSVFTFLPRNLFEQFHRVAYIYFLVIAVLNQLPQLAVFGRGASIMPLAFVLLVSAIKDAYEDFRRHRSDRVENNRLALVFEDHQFREKKWKHIRVGEVIKVQSNQTLPCDMVLLATSDPTGVVYVQTTNLDGESNLKTRYAKQETLLKAADMESFNGFIKCEKPNRNIYGFQANMEIDGRRLSLGPSNIILRGCELKNTAWALGVVVYAGGETKAMLNNSGAPSKRSRLETRMNLEIILLSLFLIVLCTIAAATAAVWLRTHRDDLDTILFYRRKDYSERPGGKNYKYYGWGWEIFFTFFMAVIVYQIMIPISLYISMELVRIGQAYFMTNDDQMYDESSDSSFQCRALNINEDLGQIKYLFSDKTGTLTDNKMEFQCACIEGVDYSDREPADSEHPGYSIEVDGIILKPKMRVRVDPVLLQLTKTGKATEEAKRANEFFLSLAACNTIVPIVSNTSDPNVKLVDYQGESPDEQALVYAAAAYGFLLIERTSGHIVINVRGETQRFNVLGLHEFDSDRKRMSVILGCPDMSVKLFVKGADSSMFGVMDESYGGVIHETKIQLHAYSSDGLRTLVVGMRELNDSEFEQWHSSFEAASTALIGRAGLLRKVAGNIETNLRIVGATAIEDKLQRGVPEAIESLRIAGIKVWVLTGDKQETAISIGFSSRLLTRNMRQIVINSNSLDSCRRSLEEANASIASNDESDNVALIIDGTSLIYVLDNDLEDVLFQVACKCSAILCCRVAPFQKAGIVALVKNRTSDMTLAIGDGANDVSMIQMADVGVGISGQEGRQAVMASDFAMGQFRFLVPLLLVHGHWNYQRMGYMILYNFYRNAVFVLILFWYVLFTCYTLTTAITEWSSVLYSVIYTAIPTIIIGILDKDLGRQTLLDHPQLYGVGQRAEGYSTTLFWYTMIDTIWQSAAIFFIPMFAYWGSTIDTSSLGDLWTIAAVVVVNLHLAMDVIRWNWITHAAIWGSIVAACICVIVIDVIPTLPGYWAIFQVGKTWMFWFCLLAIVVTSLLPRFAIKFLVEYYRPSDVRIAREAEKLGTFRESQPVGVEMNLIQDPPRR

SEQ ID NO: 22773 - protein, 153 aa, Triticum aestivum
  unsure (1)..(153): unsure at all Xaa locations
XTLTTAITEWSSLLYTVLYTSLPTIVVGILDKDLSKSTLLAYPKLYGSGQRNEKYNLNLFVLNMLEALWQSLVVFYIPYFAYRQSTIGMSSLGDLWALASVIVVNMQLAMDIIRWNWIIHAFVWGTIAATVICLFVIDSIWVLPGYGAIYHIX

SEQ ID NO: 22774 - protein, 403 aa, Mus musculus
MRGQVGDLSPQQQEALARFRETLQDLLPTLPKADDYFLLRWLRARNFDLKKSEDMLRKHVEFRNQQNLDQILTWQAPEVIQLYDSGGLSGYDYEGCPVWFDIIGTMDPKGLFMSASKQDMIRKRIKVCEMLLHECELQSQKLGRKIERMVMVFDMEGLSLRHLWKPAVEVYQQFFAILEANYPETVKNLIIIRAPKLFPVAFNLVKSFMGEETQKKIVILGGNWKQELVKFVSPDQLPVEFGGTMTDPDGNPKCLTKINYGGEVPKRYYLSNQERPQYEHSVVVGRGSSHQVENEILFPGCVLRWQFASDGGDIGFGVFLKTRMGERQKAGEMVEVLPSQRYNAHMVPEDGSLNCLKAGVYVLRFDNTYSLLHTKKVGYTAEVLLPDKACEEKLQGLGSVSPP

SEQ ID NO: 22775 - protein, 403 aa, Mus musculus
MSGRVGDLSPKQEEALAKFRENVQDVLPTLPNPDDYFLLRWLRARSFDLQKSEAMLRKHVEFRKQKDIDKIISWQPPEVIQQYLSGGRCGYDLDGCPVWYDIIGPLDAKGLLFSASKQDLLRTKMRDCELLLQECIQQTTKLGKKIETITMIYDCEGLGLKHLWKPAVEAYGEFLTMFEENYPETLKRLFVVKAPKLFPVAYNLIKPFLSEDTRRKIMVLGANWKEVLLKHISPDQLPVEYGGTMTDPDGNPKCKSKINYGGDIPKQYYVRDQVKQQYEHTVQVSRGSSHQVEYEILFPGCVLRWQFMSEGSDVGFGIFLKTKMGERQRAGEMTEVLPNQRYNSHMVPEDGTLTCSEPGIYVLRFDNTYSFIHAKKVSFTVEVLLPDKAAEEKMNQQGADTPK

SEQ ID NO: 22776 - protein, 716 aa, Mus musculus
MVQKYQSPVRVYKHPFELIMAAYERRFPTCPLIPMFVDSDTVSEFKSEDGALHVIERRCKLDIDAPRLLKKIAGVDYVYFVQKNSLNSRDRTLHIEAHNETFSNRVIIHEHCCYTVHPENEDWTCFEQSASLDIKSFFGFESTVEKIAMKHYTSNIKKGKEIIEYYLRQLEEEGITFVPRWTPPPVGPSETCSSSKNQVTSAAVLVPDAAAVMEGLSGENLSSPGTASEPVVGTPDDKLDADYIKRYLGDLTPLQESCLIRLRQWLQETHKGKIPKDEHILRFLRARDFNIDKAREIMCQSLTWRKQHQVDYILDTWTPPQVLLDYYAGGWHHHDKDGRPLYVLRLGQMDTKGLVRALGEEALLRYVLSINEEGLRRCEENTKVFGRPISSWTCLVDLEGLNMRHLWRPGVKALLRIIEVVEANYPETLGRLLILRAPRVFPVLWTLVSPFIDDNTRRKFLIYAGNDYQGPGGLLDYIDKEIIPDFLSGECMCDVPEGGLVPKSLYRTAEELENEDLKLWTETIYQSASVFKGAPHEILIQIVDASSVITWDFDVCKGDIVFNIYHSKRSPQPPKKDSLGAHSITSPGGNNVQLIDKVWQLGRDYSMVESPLICKEGESVQGSHVTRWPGFYILQWKFHTMPACAATNLPRVDDVLASLQVSSHKCKVMYYTEVIGSEDFRGSMTSLESSHSGFSQLSAATTSSSQSQSSSMISSE

SEQ ID NO: 22777 - protein, 719 aa, Mus musculus
MVQKYQSPVRVYKHPFELIMAAYERRFPTCPLIPMFVDSDTVSEFKSEDGALHVIERRCKLDIDAPRLLKKIAGVDYVYFVQKNSLNSRDRTLHIEAHNETFSNRVIIHEHCCYTVHPENEDWTCFEQSASLDIKSFFGFESTVEKIAMKHYTSNIKKGKEIIEYYLRQLEEEGITFVPRWTPPPVGPSETCSSSKNQVTSAAVLVPDAAAVMEGLSGENLSSPGTASEPVVGTPDDKLDADYIKRYLGDLTPLQESCLIRLRQWLQETHKGKIPKDEHILRFLRARGFNIDKAREIMCQSLTWRKQHQVDYILDTWTPPQVLLDYYAGGWHHHDKDGRPLYVLRLGQMDTKGLVRALGEEALLRYVLSINEEGLRRCEENTKVFGRPISSWTCLVDLEGLNMRHLWRPGVKALLRIIEVVEANYPETLGRLLILRAPRVFPVLWTLVSPFIDDNTRRKFLIYAGNDYQGPGGLLDYIDKEIIPDFLSGECMCDVPEGGLVPKSLYRTAEELENEDLKLWTETIYQSASVFKGAPHEILIQIVDASSVITWDFDVCKGDIVFNIYHSKRSPQPPKKDSLGAHSITSPGGNNVQLIDKVWQLGRDYSMVESPLICKEGESVQGSHVTRWPGFYILQWKFHTMPACAATNLPRVDDVLASLQVSSHKCKVMYYTEVIGSEDFRGSMTSLESSHSGFSQLSAATTSSSQSQSSSMISRWRFC

SEQ ID NO: 22778 - protein, 403 aa, Rattus norvegicus
MSGRVGDLSPKQEEALAKFRENVQDVLPALPNPDDYFLLRWLRARSFDLQKSEAMLRKHVEFRKQKDIDKIISWQPPEVIQQYLSGGRCGYDLDGCPVWYDIIGPLDAKGLLFSASKQDLLRTKMRDCELLLQECTQQTAKLGKKIETITMIYDCEGLGLKHLWKPAVEAYGEFLTMFEENYPETLKRLFVVKAPKLFPVAYNLIKPFLSEDTRKKIMVLGANWKEVLLKHISPDQLPVEYGGTMTDPDGNPKCKSKINYGGDIPKQYYVRDQVKQQYEHSVQISRGSSHQVEYEILFPGCVLRWQFMSEGSDVGFGIFLKTKMGERQRAGEMTEVLPNQRYNSHMVPEDGTLTCSEPGIYVLRFDNTYSFIHAKKVSFTVEVLLPDKAAEEKLNQQGAVTPK

SEQ ID NO: 22779 - protein, 1000 aa, Rattus norvegicus
MLLLTWAAASVSLGFRRGCPSSFQDKAYERRFPTCPLIPMFVDSDTVSEFKSEDGAIHVIERRCKLDIDAPRLLKKIAGVDYVYFVQKNSLNSRDRTLHIEAHNETFSNRVIIHEHCCYTRSLPSAHVIFSPLISEVPLSVWATTDVGEQTRELEVHPENEDWTCFEQSASLDIKSFFGFESTVEKIAMKHYTSNIKKGKEIIEYYLRQLEEEGITFVPRWTPPPTGPSSETCSSSKNQAASAAVLVPDAAAVKEGLSGEVLSSPGTVAEPVVGTPDDKLDADYIKRYLGDLTPLQESCLIRLRQWLQETHKGKIPKDEHILRFLRARDFNIDKAREIMCQSLTWRKQHQVDYILDTWTPPQVLQDYYAGGWHHHDKDGRPLYVLRLGQMDTKGLVRALGEEALLRYVLSINEEGLRRCEENTKVFGRPISSWTCLVDLEGLNMRHLWRPGVKALLRIIEVVEANYPETLGRLLILRAPRVFPVLWTLVSPFIDDNTRRKFLIYAGNDYQGPGGLLDYIDKEIIPDFLSGECMCDVPEGGLVPKSLYRTPEELENEDLKLWTETIYQSASVFKGAPHEVQLPGSFRNSVCPQELQILIQIVDAASVITWDFDVCKGDIVFNIYHSKRSPQPPKKDSLGAHSITSPGGNNVQLIDKVWQLGRDYSMVESPLICKEGESVQGSHVTRWPGFYILQWKFHTMPACAATNLPRVDDVLASLQVSSHKCKVMYYTEVIGSEDFRGSMTSLESSHSGFSQLSAATTSSSQSHSSSMISSPRGVWDSPNWEVCRARGSALSKPEMARPVEPALTSDGVKLTDVLQALTLSCGWPALPRKRNRGSGYGMDVVTLTFGGALVNPLIDALSSQSVLSSRTGQSDLLESHCPSGTPPGSPLCETSLFQFFQIVGPAIWCSSLLELFVPQPLLRMHVRPWTETHAPGHLQVPQLSLHAQPVFGPPGCGFFQWPRSRMMKSFEVSQNAHLLRKTQDIRLSSPPPPPLPRVDPG

SEQ ID NO: 22780 - protein, 400 aa, Rattus norvegicus
MSGRVGDLSPKQAETLAKFRENVQDVLPALPNPDDYFLLRWLRARNFDLQKSEAMLRKYMEFRKTMDIDHILDWQPPEVIQKYMPGGLCGYDRDGCPVWYDIIGPLDPKGLLFSVTKQDLLKTKMRDCERILHECDLQTERLGRKIETIVMIFDCEGLGLKHFWKPLVEVYQEFFGLLEENYPETLKFMLIVKATKLFPVGYNLMKPFLSEDTRRKIVVLGNSWKEGLLKLISPEELPAHFGGTLTDPDGNPKCLTKINYGGEIPKSMYVRDQVKTQYEHSVQISRGSSHQVEYEILFPGCVLRWQFSSDGADIGFGVFLKTKMGERQKAGEMTEVLTSQRYNAHMVPEDGSLTCTEAGVYVLRFDNTYSFVHAKKVSFTVEVLLPDEGMQKYDEELTPI

SEQ ID NO: 22781 - protein, 715 aa, Rattus norvegicus
MVQKYQSPVRVYKYPFELVMAGIRPQACRERPHPRKAYEKRFPTCPLIPVFLGSEVLSECRSADGAVHTVERSCRLRVDAPRLLRKIAGVEHVVFIQRNVLNWRERTLLIDAHNETFASRVTVKEHCRYTVHPENEDWTCFEQSASLDVRSFFGFESTLEKIAMKQYTANVKRGKEVIEHYLSELISQGASHIPRWTPAPVREADVRSQLVCPCPSSLETDGPSDAPAPASEMATADGDKLDADYIERCLGHLSPMQESCLVQLRRWLQETHKGKIPKDEHILRFLRARDFHLDKARDMLCQSLSWRKQHQVDLLLQTWRPPAPLQEFYAGGWHYQDIDISSLSWALPTHKDGRPLYILRLGQMDTKGLMKAVGEEALLQHVSGRVLEAKGRGRISSWTCLLDLEGLNMRHLWRPGVKALLRMIEVVEDNYPETLGRLLIVRAPRVFPVLWTLVSPFINENTRRKFLIYSGSNYQGPGGLVDYLDKDVIPDFLGGESVCNVPEGGMVPKSLYLTEEEQEQADQLRQWSETYHSASVLRGSPHEVAMEIPEGESVITWDFDILRGDVVFSLYHAKQAPKLSPQEPGVRASGQLIDKNWILGVDYSRVEAPLICREGQSIQGSHVTQWPGVYLLQWQIHSPPESVACSLPGVDDVLTALHSPGPKCKLLYYCEVLASEDFRGSMSSLESCASRFSQLSATTTSSSSGQSHSGSMVSR

SEQ ID NO: 22782 - protein, 670 aa, Anopheles gambiae str. PEST
TRVCASIQQHSVSTKATTKRAPKAMVQKYESPVRIYKYPFELVVAAYERRFPTCPQMPIVLDCEIIEDNVFDNGARRDTKRRCKIAVEAPYLIKKIIGVDVVYFIQQNFLDMKTRTLNIEATNESFATRVEIFEKCRYYAHPENPDWTCFDQTATLDIKNFFGIEHSMEKMGMKQYTQTTLKGKEIIEFFVNELKQEGITHVDRWVDDATVTSTTAGAATNTTPPEKPPLCRDNSILDADYIAKYLGQLTPLQESKLVQLRKRFEHGTSEHPEPDYQTLLRFLRARDFSIDKATGMLQESLQWRKEQRIDSILGEYKTPAVVEKYFPGGWHHHDKDGRPLYILRLGTMDVKGLLKSVGEDELLKLTLHICEEGLRLMKEATKLFGKPVWNWCLLVDLDGLSMRHLWRPGVKALLRIIETVETNYPETMGRVLIVRAPRVFPVLWTIVSTFIDENTRSKFLFFGGPDCMHAEDGIEQYIDTDKIPSFLGGSCNTLIHEGGLVPKHLYKSESIEETNGALQAHDHHGLYKAVDLKPGQLFELLIRNTDPKSVLTWDFEVLKNDTLFAVFHTEKEIEQSGNDDFSSVFDGPDFKEGTNYKKIEQSVKCRPKEGVQGSHEMASTGTYVLQWMCPPSCDGPAQLMYFHEILSSANYKGSMTSLQSGFSSNSLQSR

SEQ ID NO: 22783 - protein, 349 aa, Anopheles gambiae str. PEST
KQQQLEEKMSSNDSTPLNSPRKIFGKTATLDNNAMLEYEMNKNLDVKFREKADKELGETGGELTYTKIRQLRQQLNIYNENHQRALGCRRDDSFLLRFLRAKKFDVEKAFKMMQKYYKMKEEYPEIFKVSPPSEMKFMLEMQIQTMLPKKDEHGRQIYLFRVEKCDPYKIPVDYVFRSNVLALEDAVRSPETQIGGLVVLLDMAGLGFAHARYLSPHLAKKTVEVVQEAFPLRFKAFHVLHEPFYFDAILAVLKPFLKDKIRRRIHLHGSSLSSLHKYVSKDLLPAEYGGNLGPFDNTEWRQTILDNEQYFIDLETYNHLSESCYQLGGDGDAESIDSLQFGDTETEDS

SEQ ID NO: 22784 - protein, 349 aa, Anopheles gambiae str. PEST
KQQQREEKMSSNDSTPLNSPRKIFGKTATLDNNAMLEYEMNKNLDVKFREKADKELGETGGELTYTKIRQLRQQLNIYNENHQRALGCRRDDSFLLRFLRAKKFDVEKAFKMMQKYYKMKEEYPEIFKVSPPSEMKFMLEMQIQTMLPKKDEHGRQIYLFRVEKCDPYKIPVDYVFRSNVLALEDAVRSPETQIGGLVVLLDMAGLGFAHARYLSPHLAKKTVEVVQEAFPLRFKAFHVLHEPFYFDAILAVLKPFLKDKIRRRIHLHGSSLSSLHKYVSKDLLPAEYGGNLGPFDNTEWRQTILDNEQYFIDLETYNHLSESCYQLGGDGDAESIDSLQFGDTETEDS

SEQ ID NO: 22785 - protein, 301 aa, Kluyveromyces lactis
MVSEQEILESYPQVCPSGSLSGTPGNLDSEQEAKLKEFRELLESLGTKERLDDSTLLRFLRARKFDLEASKIMYENCEKWRKEFGVDTIFEDFHYEENTLVAKYYPQYYHKTDNDGRPVYIEELGSVNLTQMYKITTQERMLKNLVWEYEAFVRYRLPACSRKAGYLVETSCTILDLKGISISSAAQVLSYVREASNIGQNYYPERMGKFYLINAPFGFSTAFRLTKPFLDPVTVSKIFILGSSYQKDLLKQIPAENLPKKFGGQSEVSEAEGGLYLSDIGPWREEEYIGPEGEAPKAFQL

SEQ ID NO: 22786 - protein, 550 aa, Lotus japonicus
MSGPLSPKTALDKSDRAGSLKKKAMSLRSSLSRKSRRSSSKVMSVEIEDVRDAEDLKAVDEFRQALILDELLPEKHDDYHQLLRFLKARKFDIEKSKQMWSDMLQWRKEFGADTIVEDFDFKEIDEVVKYYPHGHHGVDKDGRPVYIENIGQVDATKLMQVTTMDRYIKYHVKEFERTFDLKFAACSIAAKKHIDQSTTILDVQGVGLKNFNKHARELITRLQKIDGDNYPETLNRMFIINAGSGFRMLWSTVKSFLDPKTTSKIHVLGNKYQSKLLEVIDASQLPEFLGGTCTCADQGGCMRSDKGPWKDPELVRMVQNGEHKCSRKCESPVVEEKKISEETTKMGANFTSQLSSVFGEVPATKVCNYEDFVPAADETVWKKVEENEQFQMSKAVVETFSMVDSCKIHEKVNSQIFTGVMAFVMGIVTMVRMTRNMPKKLTDANFYSNSVYSGGQNPSDQTNPSISAQEFMTVMKRMAELEEKMGNMNYNTCMPPEKEEMLNAAISRADALEQELMSTKKALEDSLAKQEELSAYIEKKKKKKKLFAWA

SEQ ID NO: 22787 - protein, 482 aa, Lotus japonicus
MSELLSSGTDSFKKKAINASNMLRNSLTRKGRRSSKVMSVEIEDVHDAEELKAVEEFRQALISDDLLPAKHDDYHMMLRFLKARKFEIDKSKQMWSDMLKWRKEFGADTIVEEFEFKEIDEVLKYYPQGHHGVDKEGRPVYIEQLGQVDATKLMQVTTMDRYIKYHVKEFEKTFDLKFAACSIAAKKHIDQSTTILDVQGVGLKSFNKHARELVTRIQKVDGDNYPETLNRMFIINAGSGFRILWNTVKSFLDPKTTAKINVLGNKYDTKLLEIIDASELPEFLGGTCTCTDQGGCMRSDKGPWKDEEILRMVQNGAHKCSRKPESHGEEEKPISEDKTSKFDENLTPQVSPVCDQVPAAKLSKNVDVIPVAIPVGVPVAVPAADKNASKKVGQNDTTSKEFTTVMKRMAELEEKMTTMNHQPATMPPEKEEMLNATISRADVLEKQLMDTKKALEDSLAKQEVLSAYVEKKKQKKKTFFCC

SEQ ID NO: 22788 - protein, 625 aa, Lotus japonicus
MSGPLDFFARPCFEGFSGSDEKRERRSDFENSEDERRTRIGSLKKKALSASTKFKHSLRKKSSRRKSDGRVSSVSIEDVRDVEELQAVDAFRQSLIMDELLPQAFDDYHMMLRFLKARKFDIEKAKHMWAEMLQWRKEFGADTIMQDFEFQELDEVVRYYPHGHHGVDKEGRPVYIERLGKVDPNKLMQVTTMDRYVRYHVQEFEKSFAIKFPACTIAAKRHIDSSTTILDVQGVGLKNFTKSARELITRLQKVDGDNYPETLCQMFIINAGPGFRLLWNTVKSFLDPKTTSKIHVLGNKYHSKLLEVIDASELPEFLGGACTCEDQGGCLRSDKGPWKNPEILKMVLNGEPRRARQVVKVLNSEGKVIAYAKPRYPTVKGSDTSTAESGSEAEDIASPKAMKNYSHLRLTPVREEAKIVGKSSYTNNFSGYDEYVPMVDKPVDAVLKKQASLQRSYTSQGAPSRPATQRTPEGIQARILVAITAFLLTIFTIFRQVACRVTKKLPAISSNHDQSTSEPTFDTTVVEVIPSSSTPAHTEENLLPSMLKRLGELEEKVDTLQSKPSEMPYEKEELLNAAVCRVDALEAELIATKKALYEALMRQEELLAYIDRQAEAKLRKKRFCW

SEQ ID NO: 22789 - protein, 247 aa, Gossypium hirsutum
MMMSSNNMECSAKAREEEEITKISLMRSLVETQDPSSKEVDDMTIRRFLRARELDVEKASSMFLKYLKWRRSFVPNGFISPSELTHEIQQNKMFLQGSDNKGRPISVLLAARHFQHNGGLDEFKRFILYIFDKILARMPPGQDKFIVIGDLDGWGYANCDIRAYLAALSLLQDYYPERLGKMFIVHAPYVFMAAWKIVHPFIDVKTRKKIVFVENKSLKSTLLEEIDESQLPEMYGGTLPLIPIQDS

SEQ ID NO: 22790 - protein, 560 aa, Arabidopsis thaliana
MAETKPEIEMSEEERKIVKISSLKKKAINASNRFKNSFKKKGRRSSSRVMSVPIEDDIDAEDLQALDAFRQALILDELLPSKLDDLHMMLRFLRARKFDIEKAKQMWSDMIQWRKDFGADTIIEDFDFEEIDEVMKHYPQGYHGVDKEGRPVYIERLGQIDANKLLQVTTMDRYVKYHVKEFEKTFKVKFPSCSVAANKHIDQSTTILDVQGVGLKNFSKSARELLQRLCKIDNENYPETLNRMFIINAGSGFRLLWSTVKSFLDPKTTAKIHVLGNKYHSKLLEVIDASELPEFFGGACTCEDKGGCMRSDKGPWNDPEVLKIAINREAKCSPISEDEHKHVDQGRSTSGFESLERIKKKTDEDNVYEKQIATIDKSMDMAWLAKTQKAENFPISKGITKLMKGAPKKGDGLLVGGVMAFVMGIVAMVRLSKDVPRKLTEAALYGNSVCYEESTKSKQNQGQFAAPVSSSEYMLMVKRMAELEDKCMFLDLKPAHVESEKEEKLQAALNRVQVLEQELTETKKALEEALVSQKEILAYIEKKKKKKKLVRTKHSHTSVI

SEQ ID NO: 22791 - protein, 550 aa, Arabidopsis thaliana
MADTMVAHMDRHNKIDVEISEDDKRLTKLCSLKKKAINATNKFKHSMTKKGRRHSRVACVSIVDEIDTEELQAVDAFRQALILDELLPSKHDDHHMMLRFLRARKFDLEKAKQMWSDMLNWRKEYGADTIMEDFDFKEIEEVVKYYPQGYHGVDKEGRPIYIERLGQVDATKLMKVTTIDRYVKYHVKEFEKTFNVKFPACSIAAKRHIDQSTTILDVQGVGLSNFNKAAKDLLQSIQKIDNDNYPETLNRMFIINAGCGFRLLWNTVKSFLDPKTTAKIHVLGNKYQTKLLEIIDANELPEFLGGKCTCADKGGCMRSDKGPWNDPEIFKLVQNGEGRCLRRSLSGIEEKTIFEYNNETKKKCEPEETHKQSAAEMEKKFIDTNVDAAAAADWPTKLNKAEKNPTDLKDVYSAVNPLERKGYLYGSVMALLMGIVGVMRLTKNMPRRLTEANVYSREGSAVYQDGVTVMSKQEYIAMVKKITDLEEKCKSMEAQAAFYMEREKTLDAALRRIDQLELQLSETNKVKLFFSLASLLLCLLCFVIALFSKT

SEQ ID NO: 22792 - protein, 371 aa, Arabidopsis thaliana
MTDTMSAHMDRHNKLDYDGSEDEKKTKLCSLKKKAINASNKFKHSFTKRTRRNSRVMSVSIVDDIDLEELQAVDAFRQALILDELLPSKHDDHHMMLRFLRARKFDLEKAKQMWTDMIHWRKEFGVDTIMEDFDFKEIDEVLKYYPQGYHGVDKDGRPVYIERLGQVDATKLMQVTTIDRYVKYHVREFEKTFNIKLPACSIAAKKHIDQSTTILDVQGVGLKSFSKAARDLLQRIQKIDSDNYPETLNRMFIINAGSGFRLLWSTVKSFLDPKTTAKIHVLGNKYQSKLLEIIDSNELPEFLGGNCTCADKGGCMRSDKGPWNDPDIFKMVQNGEGKCPRKTLSNIEEKTISVDENTTMVKAKYKNIFDL

SEQ ID NO: 22793 - protein, 548 aa, Arabidopsis thaliana
MTDTMSAHMDRHNKLDYDGSEDEKKTKLCSLKKKAINASNKFKHSFTKRTRRNSRVMSVSIVDDIDLEELQAVDAFRQALILDELLPSKHDDHHMMLRFLRARKFDLEKAKQMWTDMIHWRKEFGVDTIMEDFDFKEIDEVLKYYPQGYHGVDKDGRPVYIERLGQVDATKLMQVTTIDRYVKYHVREFEKTFNIKLPACSIAAKKHIDQSTTILDVQGVGLKSFSKAARDLLQRIQKIDSDNYPETLNRMFIINAGSGFRLLWSTVKSFLDPKTTAKIHVLGNKYQSKLLEIIDSNELPEFLGGNCTCADKGGCMRSDKGPWNDPDIFKMVQNGEGKCPRKTLSNIEEKTISVDENTTMKSDSFAKNKFDAENTKFIPMIDKTVNASTWPTNLHKSNYPEPEDLYSAVKPSQRRGGEGYLFGGVMSLVMGLMTVVRLTKNMPRKLTEAAIYGGEVDKAETTMVSNQEYMSMVKRMAELEEKCRSLDNQPAAFSPEKEQILTAALSRVDELELQLAQTKKTLEETMATQHVIMAYIDKKKKKKKFFGF

SEQ ID NO: 22794 - protein, 608 aa, Arabidopsis thaliana
MSGPLDRFTSPCFSNNGEKREKKSDFEVSEDEKKTRIGGILKKKSSKSKFRHSLKRRGSRSIDRTLSLTFEDIHDAEELRYVSEFRQSLISDHLLPPNLDDYHIMLRFLFARKFDLGKAKLMWTNMIQWRRDFGTDTILEDFEFPELDEVLRYYPQGYHGVDKEGRPVYIERLGKVDASKLMQVTTLERYLRYHVKEFEKTITVKFPACCIAAKRHIDSSTTILDVQGLGLKNFTKTARDLIIQLQKIDSDNYPETLHRMFIINAGSGFKLLWGTVKSFLDPKTVSKIHVLGNKYQNKLLEMIDASQLPDFFGGTCTCADQGGCMRSDKGPWKDSEILKMGRSGGTFCRHAGAFLTSDSQISSSDKPTYSLKVSDTSTAKSGSELEEMASPKTNTNNHVPKLTPVSEYANGNISPTVLSEYEECVPMVDKVVDVAWQLQEMPNASEGPQYTSSLGKIGSVRHIWSWLTAFFISFFTLLASLALPQTKEHSQLHSSSVRAELCDERIARESRPPSPPRSTITERVIISSVLSRLGDLEKQIENLHSRKSEMPHEKEELLNAAVYRVDALEAELITTKKALHEALIRQEELLGYIDRQKEAKCRRKKFCW

SEQ ID NO: 22795 - protein, 608 aa, Arabidopsis thaliana
MSGPLDRFTSPCFSNNGEKREKKSDFEVSEDEKKTRIGGILKKKSSKSKFRHSLKRRGSRSIDRTLSLTFEDIHDAEELRYVSEFRQSLISDHLLPPNLDDYHIMLRFLFARKFDLGKAKLMWTNMIQWRRDFGTDTILEDFEFPELDEVLRYYPQGYHGVDKEGRPVYIERLGKVDASKLMQVTTLERYLRYHVKEFEKTITVKFPACCIAAKRHIDSSTTILDVQGLGLKNFTKTARDLIIQLQKIDSDNYPETLHRMFIINAGSGFKLLWGTVKSFLDPKTVSKIHVLGNKYQNKLLEMIDASQLPDFFGGTCTCADQGGCMRSDKGPWKDSEILKMGRSGGTFCRHAGAFLSSDSQISSSDKPTYSLKVSDTSTAKSGSELEEMASPKTNTNNHVPKLTPVSEYANGNISPTVLSEYEECVPMVDKVVDVAWQLQEMPNASEGPQYTSSLGKIGSVRHIWSWLTAFFISFFTLLASLALPQTKEHSQLHSSSVRAELCDERIARESRPPSPPRSTITERVIISSVLSRLGDLEKQIENLHSRKSEMPHEKEELLNAAVYRVDALEAELITTKKALHEALIRQEELLGYIDRQKEAKCRRKKFCW

SEQ ID NO: 22796 - protein, 543 aa, Arabidopsis thaliana
MTLIQDAELKPRMGSFKKRSSSKNLRYSMTKRRRSSKVMSVEIIEDVHDAEELKAVDAFRQSLILDELLPEKHDDYHMMLRFLKARKFDLEKTKQMWTEMLRWRKEFGADTVMEEFDFKEIDEVLKYYPQGHHGVDKEGRPVYIERLGLVDSTKLMQVTTMDRYVNYHVMEFERTFNVKFPACSIAAKKHIDQSTTILDVQGVGLKNFNKAARDLITRLQKVDGDNYPETLNRMFIINAGSGFRMLWNTVKSFLDPKTTAKIHVLGNKYQSKLLEIIDESELPEFLGGSCTCADNGGCMRSDKGPWKNPEIMKRVHNGDHKCSKGSQAENSGEKTIPEEDDSTTEPASEEEKASKEVEIVPAAHPAWNMPEAHKFSLSKKEVYAIQEACNNATTEGGRSPIFTGVMALVMGVVTMIKVTKNVPRKLTESTLYSSPVYCDDASMNKSAMQSEKMTVPAISGEDFMAIMKRMAELEQKVTVLSAQPTVMPPDKEEMLNAAISRSNVLEQELAATKKALDDSLGRQEELVAYIEKKKKKKKLFNYW

SEQ ID NO: 22797 - protein, 612 aa, Arabidopsis thaliana
MSGSLDRFARPCFEGVSSNDERRERRSDFEVSEDEKKTRIGNFNFKKKAAKASSKLRHSLKKKGSSRRRSSDRTFSLTIEDIHDVEELRAVDEFRNLLVSENLLPPTLDDYHIMLRFLKARKFDIGKTKLMWSNMIKWRKDFGTDTIFEDFEFEEFDEVLKYYPHGYHGVDKEGRPVYIERLGLVDPAKLMQVTTVERFIRYHVREFEKTVNIKLPACCIAAKRHIDSSTTILDVQGVGFKNFSKPARDLIIQLQKIDNDNYPETLHRMFIINGGSGFKLVWATVKQFLDPKTVTKIHVIGNKYQNKLLEIIDASQLPDFLGGTCTCADRGGCMRSDKGPWNDPEILKMLQSGGPLCRHNSALNSFSRVSSCDKPSFSGIKASDTSTAESGSEVEEMASPKVNRELRVPKLTPVCEDIRGTAISYPTDSSEYDSPMVDKVVDVAWMAHEKPKASKGSEDTPDSGKIRTVTYIWRWLMMFFVNLFTLLISLALPQREGHSQSESSVDGPNARESRPPSPAFATIAERNVFSSVVNRLGDLEKQVETLHSKRHEMPREKEELLNTAVYRVDALEAELIATKKALHEALMRQDDLLAYIDREEDEKYHKKKKVCW

SEQ ID NO: 22798 - protein, 614 aa, Arabidopsis thaliana
MSGPVDRFAIPCFEGILSSDEKKERKSDFENSEDERRTRIGSLKKKAINASTKFKHSLKKKRRKSDVRVSSVSIEDVRDVEELQAVDEFRQALVMEELLPHKHDDYHMMLRFLKARKFDIEKAKHMWADMIQWRKEFGTDTIIQDFQFEEIDEVLKYYPHGYHSVDKEGRPVYIERLGKVDPNKLMQVTTLDRYIRYHVKEFERSFMLKFPACTIAAKKYIDSSTTILDVQGVGLKNFTKSARELITRLQKIDGDNYPETLHQMFIINAGPGFRLLWSTVKSFLDPKTTSKIHVLGCKYQSKLLEIIDSSELPEFLGGACTCADQGGCMLSDKGPWKNPEIVKMVLHGGAHRAKQVVKVLNSDGKVIAYAKPSYPWIKGSDTSTAESGSEAEDIVVSPKAVKSYSHLRLTPVREEAKVGSGETSFAGSFAGYDEYVPMVDKAVDATWKVKPTAINRAPSKGAHMPPNVPKDHESFSARVLVTFMAFVMAILTFFRTVSNRVVTKQLPPPPSQPQIEGSAAAEEADLLNSVLKKLTELEEKIGALQSKPSEMPYEKEELLNAAVCRVDALEAELIATKKALYEALMRQEELLAYIDRQEAAQHQKKNKRKQMFCF

SEQ ID NO: 22799 - protein, 583 aa, Arabidopsis thaliana
MSGPVDRFAIPCFEGILSSDEKKERKSDFENSEDERRTRIGSLKKKAINASTKFKHSLKKKRRKSDVRVSSVSIEDVRDVEELQAVDEFRQALVMEELLPHKHDDYHMMLRFLKARKFDIEKAKHMWADMIQWRKEFGTDTIIQDFQFEEIDEVLKYYPHGYHSVDKEGRPVYIERLGKVDPNKLMQVTTLDRYIRYHVKEFERSFMLKFPACTIAAKKYIDSSTTILDVQGVGLKNFTKSARELITRLQKIDGDNYPETLHQMFIINAGPGFRLLWSTVKSFLDPKTTSKIHVLGCKYQSKLLEIIDSSELPEFLGGACTCADQGGCMLSDKGPWKNPEIVKMVLHGGAHRAKHVVKVLNSDGKVIAYAKPSYPWIKGSDTSTAESGSEAEDIVVSPKAVKSYSHLRLTPVREEAKVGSGETSFAGSFAGYDEYVPMVDKAVDATWKVKPTAINRAPSKGAHMPPNVPKDHESFSARVLVTFMAFVMAILTFFRTVSNRVVTKQLPPPPSQPQIEGSAAAEEADLLNSVLKKLTELEEKIGALQSKPSEMPYEKEELLNAAVCRVDALEAELIATKKALYKL

SEQ ID NO: 22800 - protein, 558 aa, Arabidopsis thaliana
MSLNVDLDVCVLERPNVCSFKKRSCSKLSCSLTKKRRSSKVMSVEIFEDEHDAEELKVVDAFRQVLILDELLPDKHDDYHMMLRFLKARKFDLEKTNQMWSDMLRWRKEFGADTVMEDFEFKEIDEVLKYYPQGHHGVDKEGRPVYIERLGQVDSTKLMQVTTMDRYVNYHVMEFERTFNVKFPACSIAAKKHIDQSTTILDVQGVGLKNFNKAARDLITRLQKVDGDNYPETLNRMFIINAGSGFRMLWNTVKSFLDPKTTAKIHVLGNKYQSKLLEIIDASELPEFLGGSCTCADNGGCMRSDKGPWNNPDIMKRVNNGDHICSKRSQADNAGENIISQGNNSAVEEAPETDQSQPSPCQNVVVAHPAWNIPEAHKFSLSKRDVYAIQEACKATNESGRSPIFTGVMAFVMGVVTMIRVTKNVPRKLTESTIYSSPVYCDENSMNKSSMHGKKMATTTISGEDFMAVMKRMAELEQKVTNLSAQPATMPPEKEEMLNAAISRADFLEQELAATKKALDDSLTRQEDLVAYVERKKKKKKLVRFQINAYLTNFCFGV

SEQ ID NO: 22801 - protein, 558 aa, Arabidopsis thaliana
MKRFFSSLFCYLLVLDVVLCLDAELKPRMGSFKKRSSSKNLRYSMTKRRRSSKVMSVEIIEDVHDAEELKAVDAFRQSLILDELLPEKHDDYHMMLRFLKARKFDLEKTKQMWTEMLRWRKEFGADTVMEFDFKEIDEVLKYYPQGHHGVDKEGRPVYIERLGLVDSTKLMQVTTMDRYVNYHVMEFERTFNVKFPACSIAAKKHIDQSTTILDVQGVGLKNFNKAARDLITRLQKVDGDNYPETLNRMFIINAGSGFRMLWNTVKSFLDPKTTAKIHVLGNKYQSKLLEIIDESELPEFLGGSCTCADNGGCMRSDKGPWKNPEIMKRVHNGDHKCSKGSQAENSGEKTIPEEDDSTTEPASEEEKASKEVEIVPAAHPAWNMPEAHKFSLSKKEVYAIQEACNNATTEGGRSPIFTGVMALVMGVVTMIKVTKNVPRKLTESTLYSSPVYCDDASMNKSAMQSEKMTVPAISGEDFMAIMKRMAELEQKVTVLSAQPTVMPPDKEEMLNAAISRSNVLEQELAATKKALDDSLGRQEELVAYIEKKKKKKKLFNYW

SEQ ID NO: 22802 - protein, 547 aa, Arabidopsis thaliana
MADTKQDMENSEDGRKLVKMSSLKQKAISASNRFKNSFKKKTRRTSSKIVSVANTDDINGDDYLSVEAFRQVLVLDDLLPPKHDDLHMMLRFLRARKFDKEKAKQMWSDMLQWRMDFGVDTIIEDFEFEEIDQVLKHYPQGYHGVDKEGRPVYIERLGQIDANKLLQATTMDRYEKYHVKEFEKMFKIKFPSCSAAAKKHIDQSTTIFDVQGVGLKNFNKSARELLQRLLKIDNDNYPETLNRMFIINAGPGFRLLWAPIKKFLDPKTTSKIHVLGNKYQPKLLEAIDASELPYFFGGLCTCADKGGCLRSDKGPWNDPELLKIARNPEARFSTISEEDYLLVEEGTSMSMVFEPLERNKMKTIEENVSEKHIDAVDKFMALSLPPKPHLKTLRKGKEPQKKDDSFLVGGVIAFVMGIVAMLRLSKAVPRKLTDVALLTNSVYYEEAKMSKPNQDEVSAPPVSSSEYVIMVKRMAELEEKYKSLDSKSADEALEKDDKLQAALNRVQVLEHELSETKKALDETMVNQQGILAYIEKKNKKKRMFFRF

SEQ ID NO: 22803 - protein, 627 aa, Arabidopsis thaliana
MFAFIVVALGEILLVPETDKGKSKDYIEVSEDEKITRTRSRSLKKKAIKASNKLTHSLRKRGKRVADQYAPIVIEDVRDEEEEKAVNVFRKALVSLDLLPPRHDDYHTMLRFLKARRFDLEKTVQMWEEMLKWRKENGVDTIIQDFVYDEYEEVQQYYPHGYHGVDREGRPVYIERLGKIDPGKLMKVTTLERFLRYHVQGFEKTFSEKFPACSIAAKRHINSSTTIIDVHGVSWMSFRKLAQDLVMRMQKIDGDNYPETLNQMYIINAGNGFKLVWNTVKGFLDPKTTSKIHVLGNKYRSHLLEIIDPSELPEFLGGNCKCAHEGGCMRFNKGPWNDPEIMKLVRSRDAMYKPKEMGLLENGEVAKLFSLRHVNTDMSSPDGGHVRERESHPEHDKRAQLSNQAEAVGVGRMEQSDSTSPLPNNLAVERSLTTSLQKVASFLARFILQLLGSLCLMFRILGRLVNKQPENQLRPELSVSVSQQQVPPPQVHPCWLRLQNLETMVTVLCDKPSSIPQEKEDILRDSLDRIKSIEQDLQKTKKALFLTASKQIELAECFENLKESSSTNKFIFGSHIRSLHSYYFTHLTILQMVYIYKGKMVTGSEIEEEKAYKLFSSKQAVFMYQFL

SEQ ID NO: 22804 - protein, 582 aa, Arabidopsis thaliana
MCGLDMENSEDGRKLVKMSSLKQKAISASNRFKNSFKKKTRRTSSKIVSVANTDDINGDDYLSVEAFRQVLVLDDLLPPKHDDLHMMLRFLRARKFDKEKAKQMWSDMLQWRMDFGVDTIIEDFEFEEIDQVLKHYPQGYHGVDKEGRPVYIERLGQIDANKLLQATTMDRYEKYHVKEFEKMFKIKFPSCSAAAKKHIDQSTTIFDVQGVGLKNFNKSARELLQRLLKIDNDNYPETLNRMFIINAGPGFRLLWAPIKKFLDPKTTSKIHVLGNKYQPKLLEAIDASELPYFFGGLCTCADKGGCLRSDKGPWNDPELLKIARNPEARFSTISEEDYLLVEEGTSMSMVFEPLERNKMKTIEENVSEKHIDAVDKFMALSLPPKPHLKTLRKVCRYMYCSKIPICLRLLHCYVGKEPQKKDDSFLVGGVIAFVMGIVAMLRLSKAVPRKLTDVALLTNSVYYEEAKMSKPNQDEVSAPPVSSSEYVIMVKRMAELEEKYKSLDSKSADEALEKDDKLQAALNRVQVLEHELSETKKALDETMVNQQGILAYIEKKNKKKRMVRQIIKRASIVNTTFLSTYF

SEQ ID NO: 22805 - protein, 535 aa, Arabidopsis thaliana
MFAFIVVALGEILLVPETDKGKSKDYIEVSEDEKITRTRSRSLKKKAIKASNKLTHSLRKRGKRVADQYAPIVIEDVRDEEEEKAVNVFRKALVSLDLLPPRHDDYHTMLRFLKARRFDLEKTVQMWEEMLKWRKENGVDTIIQDFVYDEYEEVQQYYPHGYHGVDREGRPVYIERLGKIDPGKLMKVTTLERFLRYHVQGFEKTFSEKFPACSIAAKRHINSSTTIIDVHGVSWMSFRKLAQDLVMRMQKIDGDNYPETLNQMYIINAGNGFKLVWNTVKGFLDPKTTSKIHVLGNKYRSHLLEIIDPSELPEFLGGNCKCAHEGGCMRFNKGPWNDPEIMKHVNTDMSSPDGGHVRERESHPEHDKRAQLSNQAEAVGVGRMEQSDSTSPLPNNLAVERSLTTSLQKVASFLARFILQLLGSLCLMFRILGRLVNKQPENQLRPELSVSVSQQQVPPPQVHPCWLRLQNLETMVTVLCDKPSSIPQEKEDILRDSLDRIKSIEQDLQKTKKVNYRHSLICFNIYISLQVFDVS

SEQ ID NO: 22806 - protein, 530 aa, Arabidopsis thaliana
MLRFLKARKFDIGKTKLMWSNMIKWRKDFGTDTIFEDFEFEEFDEVLKYYPHGYHGVDKEGRPVYIERLGLVDPAKLMQVTTVERFIRYHVREFEKTVNIKLPACCIAAKRHIDSSTTILDVQGVGFKNFSKPARDLIIQLQKIDNDNYPETLHRMFIINGGSGFKLVWATVKQFLDPKTVTKIHVIGNKYQNKLLEIIDASQLPDFLGGTCTCADRGGCMRSDKGPWNDPEILKMLQSGGPLCRHNSALNSFSRVSSCDKPSFSGIKASDTSTAESGSEVEEMASPKVNRELRVPKLTPVCEDIRGTAISYPTDSSEYDSPMVDKVVDVAWMAHEKPKASKGSEDTPDSGKIRTVTYIWRWLMMFFVNLFTLLISLALPQREGHSQSESSVDGPNARESRPPSPAFATIAERNVFSSVVNRLGDLEKQVETLHSKRHEMPREKEELLNTAVYRVDALEAELIATKKALHEALMRQDDLLAYIDREEDEKEYTYVVFVGKTEKEGVLVKTEERESFELYELQEVVLYSAL

SEQ ID NO: 22807 - protein, 531 aa, Arabidopsis thaliana
MDELLPDRHDDYHMMLRFLKARKFDVEKAKQMWADMIQWRKEFGTDTIIQDFDFEEINEVLKHYPQCYHGVDKEGRPIYIERLGKVDPNRLMQVTSMDRYVRYHVKEFERSFMIKFPSCTISAKRHIDSSTTILDVQGVGLKNFNKSARDLITRLQKIDGDNYPETLHQMFIINAGPGFRLLWNTVKSFLDPKTSAKIHVLGYKYLSKLLEVIDVNELPEFLGGACTCADQGGCMLSDKGPWKNPEIVKMVLHGGAHRARQVVKVLNSEGKVIAYAKPSYTWIKGSDTSTAESGSDAEDIGSPKAIKSFSHLRLTPVPGETSLAGSFPGYDEYVPMVDKAVDATWKVKPAIQRVASRGALMSPTVPKDHEGIKARVLVMFMAFLMAVFTFFRTVTKKLPATTTSSPAETQGNAIELGSNGEGVKEECRPPSPVPDLTETDLLNCVTKKLTELEGKIGTLQSKPNEMPYEKEELLNAAVCRVDALEAELIATKKALYEALMRQEELLAYIDRQEEAQFQKMKKKKKKHLFCF

SEQ ID NO: 22808 - protein, 403 aa, Arabidopsis thaliana
MQETDRDIHISDGTMNKEEQSPNNEEMVEAFRNLLLLHGHLPDKHGDHNTLRRFLKMRDFDLEKSKEAFLNYMKWRVDYKVDLISQKFKFEEYGEVKKHYPHGFHKVDKTGRPIYIERLGMTDLNAFLKATTIERYVNYHIKEQEKTMSLRYPACSIASDKHVSSTTTILDVSGVGMSNFSKPARSLFMEIQKIDSNYYPETLHRLFVVNASSGFRMLWLALKTFLDARTLAKVQVLGPNYLGELLEAIEPSNLPTFLGGNCTCSDHGGCLFSDEGPWNDPGIKEKIEEPSTIEDAHSETMDKVSENAPANQKVHKDSVNEIDLLNSILKLIQIYINGMQESLGEVMITMEKYAALKTAVKDSQKRIEMLEISLHETKKVLNGLAEIIEAIQPNQPITKCKPV

SEQ ID NO: 22809 - protein, 648 aa, Arabidopsis thaliana
MSGKFRCLIRFSHLLRLCSLLRLCFFSIEGVEEISTLDEFRERRSDFEISEDERRRSKIGNLKKKAINASTKFTHSLKKRGKRKIDYRVPAVSIEDVRDEKEESVVLEFRRKLLERDLLPPRHDEYHTLLRFLKARDLNIEKTTQLWEEMLRWRKEYGTDTILEDFDFEELEEVLQYYPQGYHGVDKEGRPVYIERLGKAHPSKLMRITTIDRYLKYHVQEFERALQEKFPACSIAAKRRICSTTTILDVQGLGIKNFTPTAANLVAAMSKIDNSYYPETLHRMYIVNAGTGFKKMLWPAAQKFLDAKTIAKIHVLEPKSLFKLHEVIDSSQLPEFLGGSCSCFGDGGGCLRSNKGPWNDPEIMKLIYHGESSLFRQSTRKLTDPHYSSSYISIHPSKAIQAETSAAESISCSDVPSSPTGRLCSASSHVNSAYEEARASDVNGYYSCDDKFAIPDKATNRKGQERQSQYQMRELNATTIGLKCETSSPGAPIIRWLHDLRVMIDKIKCENLAKRLLSLMLKLAAVFRYTPLELLRSQTTVSPSSLTEDDSRCSLISPPPREPTMKDRILPCLERIQKLEKSYEDIRNKPVAIPVEKERMLMDSLDRIKSVEFDLDKTKRLLHATVMKQMEITEMLQNIRDSQLHVRT

SEQ ID NO: 22810 - protein, 457 aa, Arabidopsis thaliana
MWTNMIQWRRDFGTDTILEDFEFPELDEVLRYYPQGYHGVDKEGRPVYIERLGKVDASKLMQVTTLERYLRYHVKEFEKTITVKFPACCIAAKRHIDSSTTILDVQGLGLKNFTKTARDLIIQLQKIDSDNYPETLHRMFIINAGSGFKLLWGTVKSFLDPKTVSKIHVLGNKYQNKLLEMIDASQLPDFFGGTCTCADQGGCMRSDKGPWKDSEILKMGRSGGTFCRHAGAFLSSDSQISSSDKPTYSLKVSDTSTAKSGSELEEMASPKTNTNNHVPKLTPVSEYANGNISPTVLSEYEECVPMVDKVVDVAWQLQEMPNASEGPQYTSSLGKIGSVRHIWSWLTAFFISFFTLLASLALPQTKEHSQLHSSSVRAELCDERIARESRPPSPPRSTITERVIISSVLSRLGDLEKQIENLHSRKSEMPHEKEELLNAAVYRVDALEAELITTKKV

SEQ ID NO: 22811 - protein, 592 aa, Arabidopsis thaliana
MIVKLASFLMYMEYIATGREQTGEKLSDSEYIEEEPRRSRIGNLKKKAFSCSTKLTHPLKMRKGKRKIDFQIPLIEDVRDEKEEKLVSKLRQQLLQKDLLPPVHDDYHMLLRFLKTMEFKIEKTVTAWEEMLKWRKEFGTDRIIQDFNFKELDEVTRHYPQGYHGVDKDGRPIYIERLGKAHPGKLMEVTTIERYLKYHVQEFERTLQEKLPACSVAAKRRVTTTTTILDVEGLGMKNFTPTAANLLATIAKVDCNYYPETLHRMFIVNAGIGFRSFLWPAAQKLLDPMTIAKIQVLEPRSLSKLLEAIDSSQLPEFLGGLCKCPNEGGCLRSNKGPWNDPEIVELVHHMEVNNVPQTTTAPLHVRDYDSTTCTISPKETLKEEPEPEEYYSSTGSRSSMHTCIVPPLSDKASTSDGDKFITTVESIESAQSQLLDADTENTFANTSVREGGQILRFGALREKINSENIFHLVKILLVFPLKLFVLFGFLLPGYWQRQNTVVVPDSSTNNKVLECFDRLKKMEKEFTEISRKQVKIPEANEKLLAESLERIKSLELDLDKTKSVLHITLTKQLQITEQLESQDEEVSPLTLG

SEQ ID NO: 22812 - protein, 617 aa, Arabidopsis thaliana
MSGPVDRFAIPCFEGILSSDEKKERKSDFENSEDERRTRIGSLKKKAINASTKFKHSLKKKRRKSDVRVSSVSIEDVRDVEELQAVDEFRQALVMEELLPHKHDDYHMMLRFLKARKFDIEKAKHMWADMIQWRKEFGTDTIIQDFQFEEIDEVLKYYPHGYHSVDKEGRPVYIERLGKVDPNKLMQVTTLDRYIRYHVKEFERSFMLKFPACTIAAKKYIDSSTTILDVQGVGLKNFTKSARELITRLQKIDGDNYPETLHQMFIINAGPGFRLLWSTVKSFLDPKTTSKIHNYSILLCFAYISDVSFICFSELPEFLGGACTCADQGGCMLSDKGPWKNPEIVKMVLHGGAHRAKQVVKVLNSDGKVIAYAKPSYPWIKGSDTSTAESGSEAEDIVVSPKAVKSYSHLRLTPVREEAKVGSGETSFAGSFAGYDEYVPMVDKAVDATWKVKPTAINRAPSKGAHMPPNVPKDHESFSARVLVTFMAFVMAILTFFRTVSNRVVTKQLPPPPSQPQIEGSAAAEEADLLNSVLKKLTELEEKIGALQSKPSEMPYEKEELLNAAVCRVDALEAELIATKKALYEALMRQEELLAYIDRQEAAQHQKKNKRKQMFCF

SEQ ID NO: 22813 - protein, 640 aa, Arabidopsis thaliana
MSGSLDRFARPCFEGVSSNDERRERRSDFEVSEDEKKTRIGNFNFKKKAAKASSKLRHSLKKKGSSRRRSSDRTFSLTIEDIHDVEELRAVDEFRNLLVSENLLPPTLDDYHIMLRFLKARKFDIGKTKLMWSNMIKWRKDFGTDTIFEDFEFEEFDEVLKYYPHGYHGVDKEGRPVYIERLGLVDPAKLMQVTTVERFIRYHVREFEKTVNIKLPACCIAAKRHIDSSTTILDVQGVGFKNFSKPARDLIIQLQKIDNDNYPETLHRMFIINGGSGFKLVWATVKQFLDPKTVTKIHVNLPFYAYPSTFPQVILKIIFNRINYCRCVVVIGHCQLPDFLGGTCTCADRGGCMRSDKGPWNDPEILKMLQSGGPLCRHNSALNSFSRVSSCDKPSFSGIKASDTSTAESGSEVEEMASPKVNRELRVPKLTPVCEDIRGTAISYPTDSSEYDSPMVDKVVDVAWMAHEKPKASKGSEDTPDSGKIRTVTYIWRWLMMFFVNLFTLLISLALPQREGHSQSESSVDGPNARESRPPSPAFATIAERNVFSSVVNRLGDLEKQVETLHSKRHEMPREKEELLNTAVYRVDALEAELIATKKALHEALMRQDDLLAYIDREEDEKYHKLSYSICLVYAYMNES

SEQ ID NO: 22814 - protein, 248 aa, Arabidopsis thaliana
MADTMVAHMDRHNKIDVEISEDDKRLTKLCSLKKKAINATNKFKHSMTKKGRRHSRVACVSIVDEIDTEELQAVDAFRQALILDELLPSKHDDHHMMLRFLRARKFDLEKAKQMWSDMLNWRKEYGADTIMEDFDFKEIEEVVKYYPQGYHGVDKEGRPIYIERLGQVDATKLMKVTTIDRYVKYHVKEFEKTFNVKFPACSIAAKRHIDQSTTILDVQGVGLSNFNKAAKDLLQSIQKIDNDNYPEV

SEQ ID NO: 22815 - protein, 636 aa, Arabidopsis thaliana
MSGKFRCLIRFSHLLRLCSLLRLCFFSIEGVEEISTLDEFRERRSDFEISEDERRRSKIGNLKKKAINASTKFTHSLKKRGKRKIDYRVPAVSIEDVRDEKEESVVLEFRRKLLERDLLPPRHDEYHTLLRFLKARDLNIEKTTQLWEEMLRWRKEYGTDTILEDFDFEELEEVLQYYPQGYHGVDKEGRPVYIERLGKAHPSKLMRITTIDRYLKYHVQEFERALQEKFPACSIAAKRRICSTTTILDVQGLGIKNFTPTAANLVAAMSKIDNSYYPEVLDFLNFTSHMFFTCIPSCLKSSYYFADVAQNVHCKCWNSQLPEFLGGSCSCFGDGGGCLRSNKGPWNDPEIMKLIYHGESSLFRQSTRKLTDPHYSSSYISIHPSKAIQAETSAAESISCSDVPSSPTGRLCSASSHVNSAYEEARASDVNGYYSCDDKFAIPDKATNRKGQERQSQYQMRELNATTIGLKCETSSPGAPIIRWLHDLRVMIDKIKCENLAKRLLSLMLKLAAVFRYTPLELLRSQTTVSPSSLTEDDSRCSLISPPPREPTMKDRILPCLERIQKLEKSYEDIRNKPVAIPVEKERMLMDSLDRIKSVEFDLDKTKRLLHATVMKQMEITEMLQNIRDSQLHVRT

SEQ ID NO: 22816 - protein, 390 aa, Arabidopsis thaliana
MIPQNLGSFKEESSKLSDLSNSEKKSLDELKHLVREALDNHQFTNTPEEVKIWGIPLLEDDRSDVVLLKFLRAREFKVKDSFAMLKNTIKWRKEFKIDELVEEDLVDDLDKVVFMHGHDREGHPVCYNVYGEFQNKELYNKTFSDEEKRKHFLRTRIQFLERSIRKLDFSSGGVSTIFQVNDMKNSPGLGKKELRSATKQAVELLQDNYPEFVFKQAFINVPWWYLVFYTVIGPFMTPRSKSKLVFAGPSRSAETLFKYISPEQVPVQYGGLSVDPCDCNPDFSLEDSASEITVKPGTKQTVEIIIYEKCELVWEIRVTGWEVSYKAEFVPEEKDAYTVVIQKPRKMRPSDEPVLTHSFKVNELGKVLLTVDNPTSKKKKLVYRFNVKPL

SEQ ID NO: 22817 - protein, 490 aa, Arabidopsis thaliana
MAEEPTTTTLVTPEKLPSPSLTPSEVSESTQDALPTETETLEKVTETNPPETADTTTKPEEETAAEHHPPTVTETETASTEKQEVKDEASQKEVAEEKKSMIPQNLGSFKEESSKLSDLSNSEKKSLDELKHLVREALDNHQFTNTPEEVKIWGIPLLEDDRSDVVLLKFLRAREFKVKDSFAMLKNTIKWRKEFKIDELVEEDLVDDLDKVVFMHGHDREGHPVCYNVYGEFQNKELYNKTFSDEEKRKHFLRTRIQFLERSIRKLDFSSGGVSTIFQVNDMKNSPGLGKKELRSATKQAVELLQDNYPEFVFKQAFINVPWWYLVFYTVIGPFMTPRSKSKLVFAGPSRSAETLFKYISPEQVPVQYGGLSVDPCDCNPDFSLEDSASEITVKPGTKQTVEIIIYEKCELVWEIRVTGWEVSYKAEFVPEEKDAYTVVIQKPRKMRPSDEPVLTHSFKVNELGKVLLTVDNPTSKKKKLVYRFNVKPL

SEQ ID NO: 22818 - protein, 341 aa, Arabidopsis thaliana
MGIVSEEAIDEFQELMDQVEEPLKKTYERVHQGYLRENLGRFLKARDWNVCKAHTMLVECLRWRVDNEIDSILSKPIVPTELYRDVRDSQLIGMSGYTKEGLPVFAIGVGLSTFDKASVHYYVQSHIQINEYRDRVLLPSISKKNGRPITTCVKVLDMTGLKLSALSQIKLVTIISTIDDLNYPEKTNTYYVVNAPYIFSACWKVVKPLLQERTRKKVHVLSGCGRDELLKIMDFTSLPHFCRSGSSGSSHHTQSANCFSINHPFHQQLYNYVKHHYETQGQAEPAKQGSFHVGFPEPEAERCVIAKTIESELHKFENRNGLAVSIDDRKSSHETLANGDL

SEQ ID NO: 22819 - protein, 723 aa, Arabidopsis thaliana
MSQDSATTTPPPPLTSDVSMPSGEEDEPKHVTSEEEAPVTSETNLKLPLMPELEESNHTAEVVSEKVTPETMTLESEGLNHAAEDSEQTHEVTPETETAKLEVLNHTAEDSEQTHEVTPEKETVKSEFLNHVAEDSEQTHEVTPETETVKSEVLNHAAEDSEQPRGVTPTPETETSEADTSLLVTSETEEPNHAAEDYSETEPSQKLMLEQRRKYMEVEDWTEPELPDEAVLEAAASVPEPKQPEPQTPPPPPSTTTSTVASRSLAEMMNREEAEVEEKQKIQIPRSLGSFKEETNKISDLSETELNALQELRHLLQVSQDSSKTSIWGVPLLKDDRTDVVLLKFLRARDFKPQEAYSMLNKTLQWRIDFNIEELLDENLGDDLDKVVFMQGQDKENHPVCYNVYGEFQNKDLYQKTFSDEEKRERFLRWRIQFLEKSIRNLDFVAGGVSTICQVNDLKNSPGPGKTELRLATKQALHLLQDNYPEFVSKQIFINVPWWYLAFYRIISPFMSQRSKSKLVFAGPSRSAETLLKYISPEHVPVQYGGLSVDNCECNSDFTHDDIATEITVKPTTKQTVEIIVYEVRPFCIKTFYTTFSNAHFCVCVWKITNCGFNTKYLRFSYVLKSSYICASKHFFLQKCTIVWEIRVVGWEVSYGAEFVPENKEGYTVIIQKPRKMTAKNELVVSHSFKVGEVGRILLTVDNPTSTKKMLIYRFKVKPLACE

SEQ ID NO: 22820 - protein, 540 aa, Arabidopsis thaliana
MTAEVKVEEKQVESEVVIAPAVVPEETTVKAVVEETKVEEDESKPEGVEKSASFKEESDFFADLKESEKKALSDLKSKLEEAIVDNTLLKTKKKESSPMKEKKEEVVKPEAEVEKKKEEAAEEKVEEEKKSEAVVTEEAPKAETVEAVVTEEIIPKEEVTTVVEKVEEETKEEEKKTEDVVTEEVKAETIEVEDEDESVDKDIELWGVPLLPSKGAESTDVILLKFLRARDFKVNEAFEMLKKTLKWRKQNKIDSILGEEFGEDLATAAYMNGVDRESHPVCYNVNSEELYQTIGSEKNREKFLRWRFQLMEKGIQKLNLKPGGVTSLLQIHDLKNAPGVSRTEIWVGIKKVIETLQDNYPEFVSRNIFINVPFWFYAMRAVLSPFLTQRTKSKFVVARPAKVRETLLKYIPADELPVQYGGFKTVDDTEFSNETVSEVVVKPGSSETIEIPAPETEGTLVWDIAVLGWEVNYKEEFVPTEEGAYTVIVQKVKKMGANEGPIRNSFKNSQAGKIVLTVDNVSGKKKKVLYRYRTKTESSS

SEQ ID NO: 22821 - protein, 255 aa, Arabidopsis thaliana
MENKETKQEPAAAAEQKTVPLIEDEIERSKVGIMRALCDRQDPETKEVDDLMIRRFLRARDLDIEKASTMFLNYLTWKRSMLPKGHIPEAEIANDLSHNKMCMQGHDKMGRPIAVAIGNRHNPSKGNPDEFKRFVVYTLEKICARMPRGQEKFVAIGDLQGWGYSNCDIRGYLAALSTLQDCYPERLGKLYIVHAPYIFMTAWKVIYPFIDANTKKKIVFVENKKLTPTLLEDIDESQLPDIYGGKLPLVPIQET

SEQ ID NO: 22822 - protein, 482 aa, Cicer arietinum
DDKKPQEEEKKEEVAEEKKEEVEEEKKKEEVEEEKKKEEVVVEKKVEEEVEKKEEKQGSSSEEPKTEAKPETEAVEKKVDVTVVELVEKIATSAEEDGAKTVEAIQESIVSVTVTNGDGEQPAADVELPPSTPEEVEIWGIPLLADERSDVILLKFLRARDFKVKEAFTMIKQTVIWRKEFGIEGLLQEDLGTDWEDLGTDWDKVVFTDGYDKEGHPVCYNVFGEFENKDLYQKTFSDEEKRNKFIRWRIQFLEKSVRKLNFAPSAISTFVQVNDLKNSPGLGKRELRQATNQALQLLQDNYPEFVAKQIFINVPWWYLAFSRMISAFLTPRTKSKFFFAGPSKSADTLFKYIAPEQVPVQYGGLSREGDQEFTTADPATEVTIKPATKHAVEFPIPEKSTLVWEVRVVGWDVSYGAEFVPSAEDGYTVIVQKNRKIAPADETVINNTFKIGEPGKVVLTIDNQTSKKKKLLYRSKTIPISE

SEQ ID NO: 22823 - protein, 626 aa, Glycine max
  unsure (1)..(626): unsure at all Xaa locations
MSGPLDRFARPCFEGFSGSDEKKERRSDFENSEDERRTRIGSLKKKALNASSKFKHTLRKKSSRRKSDGRVSSVSIEDVRDFEELQAVDAFRQSLIMDELLPEAFDDYHMMLRFLKARKFDIEKAKHMWTDMLQWRKEFGADTIVQDFEFKELDEVVKYYPHGHHGVDKEGRPVYIERLGKVDPNKLMQVTTLDRYVKYHVQEFEKAFAIKFPACSIAXKRHIDSSTTILDVHGVGLKNFTKSARELITRLQKIDGDNYPETLCQMFIINAGPGFRLLWNTVKSFLDPKTTSKIHVLGNKYQSKLLEVIDASELPEFLGGTCTCEDQGGCLRSDKGPWKNPDIFKMVLNGGAWRSKQVVKVLNNERKVIVYAKPEYPMVKGSDTSTAESGSEAEDISSPKGMKSYSXHLTLTPWFMRQAKIVGKTSYASNLSGYDEYVPMVDIPVDAGWKKQASLQRSYTSKGAPPPDTQKTPEGIQARMWVALSIFFLTVLTLLRQVAYPVTKKFPALSSNDDKSTSKPPPDTTNMEVLPPSSTPSCTEENLLPSMLKRIGELEEKVDTLXQSKPSEMPYEKDEXLNAAVCRVDALEAELIASKKALYEALMRQEELLAYIDSQEKARLRKKFCW

SEQ ID NO: 22824 - protein, 604 aa, Glycine max
  unsure (1)..(604): unsure at all Xaa locations
TTSIFVDMSTNLCFEGMDERRERKLSFENNSEDDRWAKIGSLKKKALFASTKFRHSFKKKRSRKIDSRSNSLSIEDVRDVKDLQAVDAFRQALVLDNMLPPIHDDYHMLLRFLKARKFDIEKAKHMWANMIQWRKEYGTDTIMEDFEFKELNEVLKYYPHGYHGVDREGRPVYIERLGKVDPNRLMQVTTLERYLRYHVQGFEKTFAVKFPACSIAAKRHIDSSTTILDVQGVGFKNLTKSARELITRLQKIDGDYYPETLCQMFIINAGPGFKMLWNTVKTFLDPKTTSKIHVLGNKFQSKLLEIIDESELPEFLGGSCTCVDQGGCMRSDKGPWQDPNILKMVLSGEVGCSKQIVTVSNDEGRVIECDKISFPMIRGSDTSTGESGSEVEDIASPKACGNCISPMLTPVLEEARMVGKTSHAGNXXVEYVPTVDKAIDVGPKEKQATPRMXXFCSTAGFILALYTFARSIAFRVTKGIRYSDSDSARNILNMTVDFQYPWRGIXVLISCAPGGFTKTNLPSSTLKRLGELEEKVDMLQSKPSVMPHEKEELLNAAVYRVDALEAELIATKKALYEALIRQEELMAYIDSQERDKXXKRKGCW

SEQ ID NO: 22825 - protein, 658 aa, Glycine max
  unsure (1)..(658): unsure at all Xaa locations
MSGPXLDRFARPCFEGFSGSDEKKERRSDFENSEDERRTRIGSLKKKALNASSKFKHTLRKKSSRRKSDGRVSSVSIEDVRDFEELQAVDAFRQSLIMDELLPEAFDDYHMMLRFLKARKFDIEKAKHMWTDMLQWRKEFGADTIVQDFEFKELDEVVKYYPHGHHGXVDKEGRPVYIERLGKVDPNKLMQVTTLDRYVKYHVQEFEKAFAIKFPACSIAAKRHIDSSTTILDVHGVGLKNFTKSARELITRLQKIDGDNYPETLCQMFIINAGPGFRLLWSTVKSFLDPKTTSKIHVLGNKYQSKLLEVIDASELPEFLGGTCTCEDQGGCLRSDKGPWKNPDIFKMVLNGGAWRSKQVVKVLNNERKVIVYAKPGYPTVKGSDTSTAESGSEAEDISSPKAMKSYSHLTLTPVHEEAKIVGKTSYASNLSGYDEYIPMVDIPVDAGWKKQASLQRSYTSKGAPPPLDTQKTPDGLQARMWVALSVFFLTVLTLLRQVAYPVTSKPLPDTANMDVLPPSSTPTEENLLPSMLKRLGELEEKVDTLQSKPSEMPYEKEELLNAAVCRVDALEAELIATKKALYDALMRQEELLAYIDRQEEAKLRKKNKTRAFFCYGYLHLSCFDLYAFVSRKAFFPPSISRLLVLSIFSVVLNLIDA

SEQ ID NO: 22826 - protein, 318 aa, Glycine max
  unsure (1)..(318): unsure at all Xaa locations
VLDSLSSNPARPEEAINSNDTMSGTMSPKGSFKKKAINASNMLRNSLTRKGRRSSKVMSVEIEDVHDAEELKIVDEFRQALILDELLPAKHDDYHMMLRFLKARKFDIEKTKQMWSEMLKWRKEFGADTITEDFEFKELDEVLQYYPQGHHGVDKDGRPVYIERLGQVDATKMMQVTTMDRYIKYHVKEFERTFDVKFAACSIAAKKHIDQSTTILDVQGVGLKSFSKHARELVTRLQKIDGDNYPETLNRMFIINAGSGFRILWNTVKSFLDPKTTAKINVLGNKYDTKLLEIIDASELPEFLGGTCTCADQGGCMX

SEQ ID NO: 22827 - protein, 630 aa, Glycine max
  unsure (1)..(630): unsure at all Xaa locations
MSGPLDRFARPCFEGFSGSDEKKERRSDFENSEDERRTRIGSLKKKALNASSKFKHSLKKKSSRRKSDGRVSSVSIEDVRNFEEQQAVDAFRQALIMERMLPEKHDDYHVMVRXFLKARKFGIERAKHMGADMLQWRKEFGTDTIMEDFEFKEIDEVVNYYPHGHHGVDKEGRPVYIERLGKVDPNKLMQVTTMDRYVKYHVQEFEKAFKIKFPACTIAVKRHIDSSTTILDVQGVGLKNFTKSARDLIMRLQKIDGDNYPETLCQMFIINAGPGFRLLWNTVKSFLDPKTTSKIHVLGNKYQSKLLEIIDASELPEFLGGTCTCADQGGWLRSDKGPWKNPEILKMILSGEARRARPVVKVLNSEGKVIAYARPQYPMVKGSDTSTAESGSEAEDIASPKVTKSYSHLRLTPVREEAKVVGKLSSAGGGNLAGYDEYVPMVDKAVDAAWKNQASLQRSQTSKGKPPLPDTPNPPEGIRARIVVALTVFFMTLFTLFHSFACRVTKKLPAVSSNDDQGTSEPTLDITKINNDDYCPPSPTPAYAEANLLSSMMKRLGELEVKVDTLQSKPSEMPYEKEELLNAAVCRVDALEAELIATKKALYEALMRQEELLAYIDSQEEARLRKKFCW

SEQ ID NO: 22828 - protein, 618 aa, Glycine max
  unsure (1)..(618): unsure at all Xaa locations
TTSIFVDMSTNLCFEGMDERRERKLSFENNSEDDRWAKIGSLKKKALFASTKFRHSFKKKRSRKIDSRSNSLSIEDVRDVKDLQAVDAFRQALVLDNMLPPIHDDYHMLLRFLKARKFDIEKAKHMWANMIQWRKEYGTDTIMEDFEFKELNEVLKYYPHGYHGVDREGRPVYIERLGKVDPNRLMQVTTLERYLRYHVQGFEKTFAVKFPACSIAAKRHIDSSTTILDVQGVGFKNLTKSARELITRLQKIDGDYYPETLCQMFIINAGPGFKILWNTVKTFLDPKTTSKIHVLGNKFQSXLLEIIDEXEFLGGSCTCVDQGGCMRSDKGPWQDPNILKMVLSGEVECSKQIVTVSNDEGTVIECDKACYPTIRSSDTSTAESGSEVEDITSPKASGNYTNPMLTPVHEEARLIGRASDSLXXYDEYVPMVDKAIDLGWKEKQATTRNLFCSTASTFPSIQNFQDGCEAAMFSTNIIFFXXIGNRDRSLAFRVTKGIQDTKSDSAKNTNTTVDSITKEESRPPSPVPRLTKTELISSALKRLGELEEKVDILQSKPNVMPYEKEELLNAAVYRVDALEAELIATKKALXEALIRQEELMAYIYSQERRKFQRKSICW

SEQ ID NO: 22829 - protein, 650 aa, Glycine max
  unsure (1)..(650): unsure at all Xaa locations
YDGVWCEFDLLIQRLGSTVTGFVLRLXMSMSGFEGQCSNDEIRERRSDIENSEDERRQSRIGTLKKKAMNASSRFTHSLKKRGKRKIDYRVPSVSIEDVRDAREETAVHELRQKLVERGSLPPRHDDYHTLLRFLKARDFNIEKTIQMWEEMLTWRKEYGTDTILEDFEFGELEEVLQYYPQGYHGVDKEGRPVYIERLGKAHPSRLMHITTIDRYLNYHVQEFERTLQEKFPACSIAAKRQISSTTTILDVQGLGMKNFSRTAANLLSAVTKIDSSYYPETLHQMYIVNAGSGFKKMLWPATQKFLDSKTIAKIQILDSKSLYKLLEVIDSSQLPDFLGGSCTCAAXXGGCLRSNKGPWNDPDIMKLVHNEEATFVRQITRMPNGQHTFDSFQMHPLKERCSDTSTTAESGSDMNDYSSPNRHRSCPYPHLAPVHEEVKAPDLNGYYSCDDSALAVEKVIESDHFHLNREQPLQTNNIGNISCRTDSGGTYVNSWFSIVKEKIEKINVLYVARVMTFFMEKLVTLFRYLTFEFWRTQNNVHPPITMEXXNINNHSAAVETASERDYILPCVQRLQRLEKVFEELNNKPDGMPQEKEQMLMDSMDRIKSVEFDLEKTKRVLHAAVMKQLEIAELLENLKKSKCRQRRLFC

SEQ ID NO: 22830 - protein, 477 aa, Glycine max
  unsure (1)..(477): unsure at all Xaa locations
XKTKQMWADMLKWRQEFGADTIMEDFEFNELEEVLKYYPQGHHGIDKDGRPVYIEKLGQVDSIKLMQVTTMERYLKYHVREFERTFAVKLPACSISAKKHIDQSTTLLDVQGVGLKSLNKAARDLLQRLQKIDGDNYPESLNRMFIINAGSGFRLLWNTIKSFLDPKTTSKIHVLGNKYQSKLLEIIDASELPEFLGGTCTCADKGGCMLSDKGPWNDPDILKMVHNGEGKCKRKTLSGIEEKRIIEEGNKESFPERYDVDVQCLSPKKQCTVYKYDAFVPEASRFILEXTLTQKDKDALSKGADCFPSKTCDGYSNHFVGGIMAIVMGIVTMIRMTRNMPRKITEAALYGSSGYYDGTMMKAATFSCNDYMAMMKRMAELEEKVTILSMKPVIPPEKEEVLNNALGRVTTIEQDLVATKKALDDALARQVELQAQIDKKKKKKNKLFRFRCFAXVISNASGRVVKLEAFYFDCLFD

SEQ ID NO: 22831 - protein, 370 aa, Glycine max
SSQLRRPPPRLINSTYQEEQLQTLAQFRTKVAEMGCSNPTYDDTYLLRFLRARKFDLKDTMAMWTNYINWRKEKRVDEICKMEISEMIEAKQYYPHLWFRTDKLGRPIYIERVGKVNFDKLMKIISLERVEQHFIQDSERLIHEIFPACSKAKGETVQNTCYIMDMKGAAAKMMSSKVWDLLKMISKIGQDYYPETLGHMFIINVPLFFYGIWNVVKHFVDDKTRKKIHILGSGYKKELFQYVDEKDLPDFLGGKATVEDYGENLTKEQGPWVKGDNELVNNSPVQEMNRKISTEAGEDDRPSLVLDIPETEQMRTKSVPVLPKSSTSIESLNDMEGYDVATESPLKVRVKSLQTKPSMSFNTLRSFGVI

SEQ ID NO: 22832 - protein, 218 aa, Glycine max
  unsure (1)..(218): unsure at all Xaa locations
MSGPLSPKTSLEKSDRVGSLKKMLRNSLTRSKRRSSSKVMSVEIEDIRDAEESKAVDEFRQALVLDELLPEKHDDYHMLLRFLKARKFDLEKSKQMWSDMLQWRKEFGADTITEDFEFKELDEVLQYYPQGHHGVDKDGRPIYIERLGQVDATKLMQVTTMDRYIKYHVKEFERTFDVKFAACTIAAKKHIDQSTTILDVQGVGLKNFNKHARELITX

SEQ ID NO: 22833 - protein, 299 aa, Glycine max
  unsure (1)..(299): unsure at all Xaa locations
GGVGYWLPDFEFEELEEVLQHYPQGYHGVDKEGRPVYIERLGKAHPSRLMRITTIDRYLKYHVQEFERALQEKFPACTIAAKRRISSTTTVLDVQGLGMKNFSPTAASLLAAISKIDNSYYPETLHRMYIINAGPGFKRMLWPAAQKFLDAKTIAKIQVLEPKSLCKLLDIIDSSQLPDFLGGTCTCPGXXGGCLRSSKGPWNDPDIMKMVHSVEATFERQIARMSNEQQNLDSFXXICPQKGQCSDTSTAESGSDLDDSFSSIGQSRFTFPRLAAVHEEVRVSDNYYSCDDSAPAAEK

SEQ ID NO: 22834 - protein, 211 aa, Glycine max
  unsure (1)..(211): unsure at all Xaa locations
MCDTMSMSSAPITDHRPVKGLEMEYVEDDKKKKLGSLKKVAISASSKFRHSLQMKGRRHSRVVSVAIEDNVDAQELQVVDAFRQALILEELLPAKYDDHHTMLRFLRARKFDIEKTKQMWADMLQWRREFGADTIMEDFEFKERDEVQKYYPQGHHGVDKEGRPVYIEKLGQVDSNKLMQVTTMDRYLKYHVREFEKTFVVKFPACXISAK

SEQ ID NO: 22835 - protein, 232 aa, Glycine max
  unsure (1)..(232): unsure at all Xaa locations
MSGPLDRFARPCFEGFSGSDEKKERRSDFENSEDERRTRIGSLKKKALNASSKFKHSLKKKSSRRKSDGRVSSVSIEDVRNFEEQQAVDAFRQALIMEELLPEKHDDYHVMLRFLKARKFDIERAKHMWADMLQWRKEFGTDTIMEDFEFKEIDEVVNYYPHGHHGVDKEGRPVYIERLGKVDPNKLMQVTTMDRYVKYHVQEFEKAFKIKISACTIVAKRHIDSSTTILDX

SEQ ID NO: 22836 - protein, 186 aa, Glycine max
VDKVEKPVYIERLSKVDPDKLMQVTTMDRYVQYHVHDFEKAFNIKFNACTIDHKRHIDSSTTILDVQGLHLNNFTKSDRDLIMRIQKIDGDNYPETLCQMFIINAGPGFRLLWNTVKSFLDPKTTSKIHVLGNKYQSKLFEIIDASELPEFLGGTCTCADQGGCLRSDKGPWKNPGILKMILNGET

SEQ ID NO: 22837 - protein, 135 aa, Glycine max
  unsure (1)..(135): unsure at all Xaa locations
HXCRFLKARKFDIDXXVQMWADMLHWRKEYGVDSILQEFVYKEYEEVQCYYPHGYHGVDKEGQPVYIERLGKVEPSKLMSVTTVDRXXKYHVQGFEKMFKEKFPACSIAAKRHIDKTTTILDVHGVVKFMLTTTX

SEQ ID NO: 22838 - protein, 118 aa, Glycine max
  unsure (1)..(118): unsure at all Xaa locations
XFLKARKFDIDXXVQMWADMLHWRKEYGVDSILQEYEEVQCYYPHGYHGVDKEGQPVYIERLGKVEPSKLMSVTTVDRXXKYHVQGFEKMFKEKFPACSIAAKRHIDKTTTILDVHGV

SEQ ID NO: 22839 - protein, 517 aa, Glycine max
MAEEAPNQTTTPPPPQESVVQVEEVVVTDVPQPPEKTTTTVPVESDSQPEPEEPVKKPVEETPEFKEESTKLSELPENENKALQDLKKLVQDALNNHHFSSKEDNKNPPPQTAAHKEEVVTETKTDAAPAKTEEEQAAAVDDDGAKTVEAIEETVVAVSSTVQPQAEEKASSPLPPEEVSIWGIPLLADERSDVILLKFLRAREFRVKEAFTMLKNTIQWRKEFGMEELMEEKLGDELEKVVFMHGFDKEGHPVCYNIYGEFQNKELYKKTFSDEEKREKFLRWRIQFLEKSIRKLDFNPGGICTIVHVNDLKNSPGLAKWELRQATKHALQLLQDNYPEFVAKQVFINVPWWYLAVNRMISPFLTQRTKSKFVFAGPSKSTETLLRYIAPEQLPVKYGGLSKDGEFGNIDAVTEITVRPAAKHSVEFSVTENCLLSWELRVIGWEVTYGAEFVPSSEGSYTVIVQKARKVASSEEPVLCNSFKVGEPGKVVLTIDNTSSKKKKLLYRLKTKPSPSD

SEQ ID NO: 22840 - protein, 493 aa, Glycine max
MFHSHQKKQQPPVPVEETVTLETHLSKPNNADDNDNIIPEFKEESTKLSELPENENKALQDLKKLVQDALNNHHFSSKEDNKNPPPQTAAHKEEVVTETKTDAAPAKTEEEQAAAVDDDGAKTVEAIEETVVAVSSTVQPQAEEKASSPLPPEEVSIWGIPLLADERSDVILLKFLRAREFRVKEAFTMLKNTIQWRKEFGMEELMEEKLGDELEKVVFMHGFDKEGHPVCYNIYGEFQNKELYKKTFSDEEKREKFLRWRIQFLEKSIRKLDFNPGGICTIVHVNDLKNSPGLAKWELRQATKHALQLLQDNYPEFVAKQVFINVPWWYLAVNRMISPFLTQRTKSKFVFAGPSKSTETLLRYIAPEQLPVKYGGLSKDGEFGNIDAVTEITVRPAAKHSVEFSVTENCLLSWELRVIGWEVTYGAEFVPSSEGSYTVIVQKARKVASSEEPVLCNSFKVGEPGKVVLTIDNTSSKKKKLLYRLKTKPSPSD

SEQ ID NO: 22841 - protein, 495 aa, Glycine max
MAEEVPKTSTTPEEVVVSDVAPADEKPDTTTDVVVPVEKEQEQETSPEKEKENVPETAETESEVVSKPSDEKPEHKEEQKPVEEEKKEHAAEEETEKEAAEVTVTETEVVEEISASADEDGAKTVEAIEESVVSVTVTVSEEPKVEAVSLSASPEEVCIWGVPLLADDRSDVILLKFLRARDFKVKEALAMIKSTIRWRKEFKMEELLEEDLGGDGLEKAVYMHGFDKEGHPVCYNIYGEFQNKELYKKSFSDEEKRYRFLRWRIQFLEKSIRKLDFNPGGICTIVQVNDLRNSPGPSKWELRQATKQALQLLQDNYPEFVAKQVFINVPWWYLAVNRMISPFLTQRTKSKFVFAGPSKSAETLLRYIAAEQLPVKYGGLSKDGEFGISDAVTEITVRSAAKHTVEFPVTENSLLSWELRVIGWDVSYGAEFVPTSEGSYTVIIQKARKVASSEEPVLCNNYKIGEPGKVVLTIDNQSSKKKKLLYRLKVKPSSD

SEQ ID NO: 22842 - protein, 565 aa, Glycine max
MAEEAPNQTTTPPPPQESVVQVEEVVVTDVPQPPEKTTTTVPVESDSQPEPEEPVKKPVEETVTLETHLSKPNNADDNDNIIPEFKEESTKLSELPENENKALQDLKKLVQDALNNHHFSSKEDNKNPPPQTAAHKEEVVTETKTDAAPAKTEEEQAETKEEEEKKEEVKETNEEAAVDDDGAKTVEAIEETVGAVSSTVQPQAEEKASEPEATKEESSPPLPPEEASIWGIPLLADERSDVILLKFLRAREFKVKEAFTMLKNTIQWRKEFGMEELMEEKLGDELEKVVFMHGFDKEGHPVCYNIYEEFQNKELYKKTFSDEEKREKFLRWRIQFLEKSIRKLDFNPGGICTIVHVNDLKNSPGLAKWELRQATKHALQLLQDNYPEFVAKQVFINVPWWYLAVNRMISPFLTQRTKSKFVFAGPSKSTETLLRYIAPEQLPVKYGGLGKDGEFGNTDAVTEITVRPAAKHTVEFSVTENCLLSWELRVIGWEVSYGAEFVPSSEGSYTVIVQKARKVASSEEPVLCNSFKVGEPGKVVLTIDNTSSKKKKLLYRLKTKPSLSD

SEQ ID NO: 22843 - protein, 265 aa, Glycine max
MEGVSPEPLRSELDSKSKQDTAKEEDDDTFKESTDAEVTKIRLMRAFVESRDPSSKEVDDLMIRRFLRARSLDVEKASAMFLKYLKWKRSFVPNGYISPSEIAEDIAQDKVFTQGLDKKGRPIVVAFAAKHFQSKNGADGFKRYVVFVLEKLCSRMPPGQEKFLAIADIKGWAYVNSDLRGYLNSLSILQDCYPERLGKMLIVHAPYMFMKIWKMIYPFIDENTKKKIVFVENKKLKSTLLEEIEESQIPDIYGGQMPLVPIQNS

SEQ ID NO: 22844 - protein, 383 aa, Glycine max
  unsure (1)..(383): unsure at all Xaa locations
XKKEVEVTEEKKEAEVIEEKKETEVIEEKKESXARGPEVVPEEVEIWGIPLLGDERSDVILLKFLRARDFKVKEALNMIRNTVRWRKEFGIEGLVEEDLGSDWEKVVFKDGYDKEGHPVYYNVFGEFEDKELYSKTFLDEEKRNKFIRWRIQSLEKSVRSLDFSPNGISTIVQVNDLKNSPGLGKRELRQATNQALQLLQDNYPEFVAKQIFINVPWWYLAFSRMISPFFTQRTKSKFVFAGPSKSADTLFRYIAPELVPVQYGGLSREAEQEFTSAYPVTEFTIKPATKHSVEFPVSEKSHLVWEIRVVGWDVSYGAEFVPGAEDGYTVIVQKNRKIGPADETVITNAFKIGEPGKIVLTIDNQTSKKKKLLYRSKTKPIPE

SEQ ID NO: 22845 - protein, 377 aa, Glycine max
  unsure (1)..(377): unsure at all Xaa locations
XLERKRRRKIIPKNTMMLGETHRPNPTVHVPPVVPEEVEIWEIPLLGDEGSDVILLKFLRARDFKVKEALNMIRNTVRWRKEFGIEGLVEEDLGSDWEKVVFKDGYDKEGHPVYYNVFGEFEDKELYSKTFLDEEKRNKFIRWRIQSLEKSVRSLDFSPNGISTIVQVNDLKNSPGLGKRELRQATNQALQLLQDNYPEFVAKQIFINVPWWYLAFSRMISPFFTQRTKSKFVFAGPSKSADTLFRYIAPELVPVQYGGLSREAEQEFTSAYPVTEFTIKPATKHSVEFPVSEKSHLVWEIRVVGWDVSYGAEFVPSAEDGYTVIVHKSRKIAPADETVLTNGFKIGEPGKIVLTIDNQTSKKKKLLYRSKTKPIAE

SEQ ID NO: 22846 - protein, 357 aa, Oryza sativa (japonica cultivar-group)
MSVIHAEDIEISLCDGNSEDERRRRRIGSNLRRKAIHAIKKRGRRRVDCRFPPAISIEDVRDAEEERAVAAFHDRLAAHGLLPDKHDDYHMMLRFLKARKFDIDRAMQMWADMLKWREEFGADTILQDFDFHELDEVLRYYPQGYHGVDREGRPVYIERLGKVDPNKLMQITSVDRYIKYHVQEFERAFRERFPACTLAAKRHIDSTTTILDVQGVGFKNFSKTARELINRMQKIDSDYYPETLHQMFVVNAGSGFKLIWNSVKGFLDPKTSSKIHVLGSNYQSRLLEVIDSSELPDFLGGSCSCSDKGGCLGSNKGPWNDPFILKKGVDYGYLTPVHEETSEEARECPFLYRTCPI

SEQ ID NO: 22847 - protein, 418 aa, Oryza sativa (japonica cultivar-group)
MSFKSIDRLIRRNSKTKLSRNIVDGIYDQKEEQYVQSLRELLLANNQLPEKFDDYHVLLRFLKMRGFNIVKAKEMFLNMLKWREECAVDAIAKDFKFEEYDAVKRCYPHGFHGVDRFGRPLYIERIGLVDLNKLMQVSSTDRYVKYHISEQEKTLSLRYPACSLVAKKHIGSTTAIFDVKGLGMNNFSKSGRDLFIEIQKIDSNYYPETLNQLYIINAGAGFRALWKVLKACMEARTLAKIQVLGTNYLSTILEAVDPSNLPDFLGGTCTCSATGGCLLQDKGPWTDQEISQASKGVFGKGQKSFDEISTTVACENFPGHQEPSVGKLHPISGWKRTLGMLLKDNQVGDTNENIQQNKVNEQISEKIQELENCSAQTQETLHALLQKQNELANHIEQLRKLLREAANADNKANVLILK

SEQ ID NO: 22848 - protein, 492 aa, Oryza sativa (japonica cultivar-group)
MRDAWHALARSTDQSRSARLGDSITLRGIEVGPRVGKAKMAGSIDRPCAGFEGIVHDDDKKEWKSDEDNSEGDKKAKAVSFKNRAISAGNKFRRSLRRKRRRRVGDHVASIEDIRDVKELEAVQRFHQCLHDEGLLPERHDDYHVMLRFLKARKFDIDKAKHMWSEMLRWRKEFGADNIEEFDYSELDDVLECYPQFYHGVDKEGRPVYIELIGKVDPNKLVQVTTIDRYVKYHVKESEKCLQMRFPACSIAAKRHIDSCSTILDVQGVGLKNFSKDARELIMRLQKINNDNYPENLFLSGVITKDLSNTFLVLVQTLHRLYIINAGQGFKMLWGTIKSFLDPQTASKIHVLGSKYQNKLLETIDESELPDFLGGKCRFVLVEKHNDGTGRTSKSNYCVVDSLNQNSTHSSVLRRLGELEEKLQELEAKQSQMPPDREELLNGAIHRVDALEAELISTKKMLYDALMRLDELLAYADQQKNIQFRVSCGFFL

SEQ ID NO: 22849 - protein, 564 aa, Oryza sativa (japonica cultivar-group)
MTEVLSRPLEHRLSSATLDGHYEEKRKSNVEYSEDEKKAKIMSLKKKAMSSSQKLRHSMKKGRRSSKVMSISIADERDPEEVQAVDAFRQLLILEELLPSQHDDYHMMLRFLKARKFDVEKAKQMWADMLRWRKEFGADTILEDFEFEEAGKVAECYPQGYHGVDKEGRPVYIERLGQIDVNRLMQVTTMDRFIKNHVREFEKNFAVKFPACSIATKCHIDQSTTILDVQGVGMKQFSKAARDLIGQLQKIDGDNYPEVLGNKYQSKLLEVIDASELPEFFGGTCQCEGGCMKADKGPWKDDEVMKMVQSGVGWCGNLNLNHLEAEEKMMICEDDTMYTKKQESFKDEGRTLSRKISRARIEHPTLSPVCEELPPMMLPTPGSPYSCDVPMVEKAIDAICQSKGSRDENVAITKAIVNASNGSNPPLFGGVMALVMSIATMLRVSRNMPKKVLGATLGAQSTSKIQAQQLSKISMEAVSAAEYASSTKRLSDIEEKVIAILTKPAEMPADKEEMLKTAVSRVSALEEELAATKKALQETLERQEEIMAYIEKKKKKKSKRLFRW

SEQ ID NO: 22850 - protein, 247 aa, Oryza sativa (japonica cultivar-group)
MAGNRGGDAGEGEWLKVAELRATVEAQDPHAKEVDNLTLRRFLRARDHNVEKASAMLLKALRWRREAVPGGSVPEEKVQSDLDDDKVYMGGADRTGRPILLAFPAKHFSAKRDMPKFKSYCVYLLDSICARIPRGQEKFVCIVDLKGWGYSNCDIRAYIAAIEIMQNYYPERLGKALMIHVPYMFMKAWKMIYPFIDNVTRDKFVFVDDKSLQEVLHQEIDDSQIPDTLGGKLAPVSLKNNARINLD

SEQ ID NO: 22851 - protein, 261 aa, Oryza sativa (japonica cultivar-group)
MDYCKQQERDGHRDDGDVTEWKKVAELRAVVEAQDPACKEEDDYQLRRFLRARDHNIGKASAMLVKYLQWKREVKPGGRAIADEEVRGELAQEKLYMQGYDRQGRPLVYGFGARHFPARRDLDEFKRYVVYVLDRTCARLGGNGGQEKFAAVADLQGWGYYGNCDIRAYVAALEIMQNYYPERLGRVFLIHVPYVFMAAWKIIYPFIDDNTKKKFVFVADKDLHATLRDAIDDSNLAEDYGGKLKLVSPLINGATESNRRR

SEQ ID NO: 22852 - protein, 613 aa, Oryza sativa (japonica cultivar-group)
MAEEPQPEAAPAAVAATTEVAVAEKAPVEAEKEKKVEEETPAVEAEAKEEKKDEAAAAAAAGGDEAGAIEGTGSFKEESNLVADLPDPEKKALDEFKQLIAAALAACEFNLPPPPPPPKAKVEAAVEETKAEETKAEEEPKAEEPAKEEEPKAEVAAAAAAPPEAGTEEPKAEASSEEAKTEEPKAEAAADEPAKEESKAEAAPAEEAKPAEPEPEEKTVVVTEEEAATKTVEAIEETVVPAAAAPAAAATEEAAAPEPEVQAAAAPEPVLIWGVPLVGDDERTDTVLLKFLRAREFKVKEAMAMLRSAVLWRKRFGIESLLDADLALPELDSVVFYRGADREGHPVCYNVYGEFQDKDLYEKAFGDEEKRERFLKWRIQLLERGILSQLDFSPSGICSMVQVTDLKNSPPMLGKHRAVTRQAVALLQDNYPEFIAKKVFINVPWWYLAANKMMSPFLTQRTKSKFIFASPAKSAETLFRYIAPEQVPVQFGGLFKEDDPEFTTSDAVTELTIKPSSKETVEIPVTENSTIGWELRVLGWEVSYGAEFTPDAEGGYTVIVQKTRKVPANEEPIMKGSFKVGEPGKIVLTINNPASKKKKLLYRSKVKSTSESV

SEQ ID NO: 22853 - protein, 502 aa, Oryza sativa
  unsure (1)..(502): unsure at all Xaa locations
MKKGRRSSKVISISIADERDPEEVQAVDAFRQLLVLEELLPSHHDDYHMMLRFLKARKFDVEKAKQMWVDMLQWRKEFAADTILEDFEFEEADKVAECYPQGYHGVDKEGRPVYIERLGQINVNRLMQVTTMDRFIKNHVREFEKNFAVKFPACSIAAKCHIDQSTTILDVQGVGMKQFSKAARDLIGQLQKIDGDNYPETLCRMFIINAGPGFRLLWSTVKSFLDPKTTAKIHVLGNKYQSKLLEVIDASELPEFFGGTCQCXXGGCMKADKGPWKDAEILKMVQSGAGWCGNLSLNHLDAEEKMMICEDDTMHTKTLGSAYSCDVPMVEKAIDAICQSKGLPDENVTEPKRLXNASNGSNPPLYGGIMALVMSIATMLRVSRNMPKKVLGATLGAQSTSKIQAQQLSEISVEAVSVAEYVSSTKRLSDIEEKVIAILTKPAEMPADKEEMLKTAVSRVSALEEELAATKKALQETLERQEEIMAYIEKKKKKKSKRLFRW

SEQ ID NO: 22854 - protein, 565 aa, Oryza sativa
  unsure (1)..(565): unsure at all Xaa locations
MTEVLSRPLEHRLSSPTLDGHYEEKRKSNVEYSEDEKKAKIISLKKKAMSASQKLRHSMKKGRRSSKVISISIADERDPEEVQAVDAFRQLLVLEELLPSHHDDYHMMLRFLKARKFDVEKAKQMWVDMLQWRKEFAADTILEDFEFEEADKVAECYPQGYHGVDKEGRPVYIERLGQINVNRLMQVTTMDRFIKNHVREFEKNFAVKFPACSIAAKCHIDQSTTILDVQGVGMKQFSKAARDLIGQLQKIDGDNYPETLCRMFIINAGPGFRLLWSTVKSFLDPKTTAKIHVLGNKYQSKLLEVIDASELPEFFGGTCQCXXGGCMKADKGPWKDAEILKMVQSGAGWCGNLSLNHLDAEEKMMICEDDTMHTKRQESFKYEGSYSCDVPMVEKAIDAICQSKGLPDENVTEPKRLXNASNGSNPPLYGGIMALVMSIATMLRVSRNMPKKVLGATLGAQSTSKIQAQQLSEISVEAVSVAEYVSSTKRLSDIEEKVIAILTKPAEMPADKEEMLKTAVSRVSALEEELAATKKALQETLERQEEIMAYIEKKKKKKSKRLFRW

SEQ ID NO: 22855 - protein, 615 aa, Oryza sativa
  unsure (1)..(615): unsure at all Xaa locations
MSGPLDRFARPCFEGFTHNDEKKEIRSDADNSEGEKKTKIGSFKKKAINAGNKFRHSLRRRSKKKNEXXRGSIEDIRDVQDLQAVDAFRQCLVDEDLLPQQHDDYHTMLRFLKARKFDVEKAKSMWSDMLKWRKEFGADNIEEFDYTEADEVMKYYPQFYHGVDKEGRPIYIELIGKVDANKLMQVTTIERYVKYHVKEFERCFQMRFPACSIAAKRPIDSSTTILDVQGVGLKNFSKAARDLITRLQKIDNDNYPETLRRMYIINAGQGFKMLWSTVKSFLDPKTASKIHVLGSKYQNKLLEIIDENELPEFFGGKCKCEAFGGCKKSDKGPWKDPNIIKRVLNGEANYGRQIVTISSTDGKIIRYAGPQYPTRKGSDGSAESGSEVEDGASPMASRNLITNPLLTPVHEESKLAAHGFTSASPSIIEESIPVVDKVVDDXXMGQSXXASSSPSRSLPITFDGLWTQVITWLTVLIVSLFAMVRSVPSRMAKRFSSQSTDHDHSYVEYPQEAEYKEVRPPSPAPSYTEKDVLSSMVRRLGELEEKVQALETKPSEMPFEKEELLNAAVRRVDALEAELISTKKALYEALMRQDELLAYIDKQDMIKFRKKKFCF

SEQ ID NO: 22856 - protein, 551 aa, Oryza sativa
  unsure (1)..(551): unsure at all Xaa locations
LFKRSCEFWAWLXINVLNLCLQAQSQAPVGFYKAMSASQKLRHSMKKGRRSSKVISISIADXXRDPEEVQAVDAFRQLLVLEELLPSHHDDYHMMLRFLKARKFDVEKAKQMWVDMLQWRKEFAADTILEFEFEEADKVAECYPQGYHGVDKEGRPVYIERLGQINVNRLMQVTTMDRFIKNHVREFEKNFAVKFPACSIAAKCHIDQSTTILDVQGVGMKQFSKAARDLIGQLQKIDGDNYPETLCRMFIINAGPGFRLLWSTVKSFLDPKTTAKIHVLGNKYQSKLLEVIDASELPEFFGGTCQCXXGGCMKADKGPWKDAEILKSFFNADPRISLFLXCSNGXEKAIDAICQSKGLPDENVTVTKGXTSLRPNNLVTXYCYSLVSFXLTDWIIFFLQRLXXNASNGSNPPLYGGIMALVMSIATMLRVSRNMPKKVLGATLGAQSTSKIQAQQLSEISVEAVSVAEYVSSTKRLSDIEEKVIAILTKPAEMPADKEEMLKTAVSRVSALEEELAATKKALQETLERQEEIMAYIEKKKKKKSKVKKGN

SEQ ID NO: 22857 - protein, 357 aa, Oryza sativa; identical to SEQ ID NO: 22846

SEQ ID NO: 22858 - protein, 323 aa, Oryza sativa
  unsure (1)..(323): unsure at all Xaa locations
XRKRGGRRRRRRVDFRYPAAMSIEDVRDAEEELAVAAFRDRLAVHALLPDKHDDYHMMLRFLKARKFDSEKAMQMWAEMLRWRKEFGADTILEEFEFDELDDVLRYYPQGYHGVDREGRPVYIERLGKVYPNKLMQITSVDRYIKYHVQEFERAFRERFPACTLAAKRHIDSTTTILDVHGVGLKNFSKTARELVHRMQKIDSDYYPETLHQMYVVNAGSGFKLIWNSVKGFLDPKTSSKIHVLGTNYQSRLLEVIDKSELPEFLGGSCTCSXXGGCLGSNKGPWNDHVILKRSTDYSFLTPVSEEVCAVLICXTILYFNXDT

SEQ ID NO: 22859 - protein, 322 aa, Oryza sativa
  unsure (1)..(322): unsure at all Xaa locations
VHALLPDKHDDYHMMLRFLKARKFDSEKAMQMWAEMLRWRKEFGADTILEEFEFDELDDVLRYYPQGYHGVDREGRPVYIERLGKVYPNKLMQITSVDRYIKYHVQEFERAFRERFPACTLAAKRHIDSTTTILDVHGVGLKNFSKTARELVHRMQKIDSDYYPETLHQMYVVNAGSGFKLIWNSVKGFLDPKTSSKIHVLGTNYQSRLLEVIDKSELPEFLGGSCTCSXXGGCLGSNKGPWNDHVILKRSTDYSFLTPVKGSDSSTFCSCESCDRKGLPDVTPESSQSVQQSSEMVPNQLVSHEHSSTTRWMNNLGTSSFS

SEQ ID NO: 22860 - protein, 419 aa, Oryza sativa
  unsure (1)..(419): unsure at all Xaa locations
MLPLYTGSISSYYGRTVRPCATRGTRSPGRRTRADVSRPRGTPTCRLMQRRGCCEPMDPVQXFEGIVHDDDKKEWKSDEDNSEGDKKAKAVSFKNRAISAGNKFRRSLRRKRRRXXVGDHVASIEDIRDVKELEAVQRFHQCLHDEGLLPERHDDYHVMLRFLKARKFDIDKAKHMWSEMLRWRKEFGADNIEEFDYSELDDVLECYPQFYHGVDKEGRPVYIELIGKVDPNKLVQVTTIDRYVKYHVKESEKCLQMRFPACSIAAKRHIDSCSTILDVQGVGLKNFSKDARELIMRLQKINNDNYPETLHRLYIINAGQGFKMLWGTIKSFLDPQTASKIHVLGSKYQNKLLETIDESELPDFLGGKCTYADQQKNIQFRRGTYTQALNISVKAHGXRPVQYXSTFNYDQSETSAILX

SEQ ID NO: 22861 - protein, 272 aa, Oryza sativa
MSIEDVRDAEEELAVAAFRDRLAVHALLPDKHDDYHMMLRFLKARKFDSEKAMQMWAEMLRWRKEFGADTILEEFEFDELDDVLRYYPQGYHGVDREGRPVYIERLGKVYPNKLMQITSVDRYIKYHVQEFERAFRERFPACTLAAKRHIDSTTTILDVHGVGLKNFSKTARELVHRMQKIDSDYYPETLHQMYVVNAGSGFKLIWNSVKGFLDPKTSSKIHVLGTNYQSRLLEVIDKSEGGCLGSNKGPWNDHVILKESTDYSFLTPVSEE

SEQ ID NO: 22862 - protein, 623 aa, Oryza sativa
  unsure (1)..(623): unsure at all Xaa locations
SIGPVSANCFPCFEGIVHDDDKKEWKSDEDNSEGDKKAKAVSFKNRAISAGNKFRRSLRRKRRRXXVGDHVASIEDIRDVKELEAVQRFHQCLHDEGLLPERHDDYHVMLRFLKARKFDIDKAKHMWSEMLRWRKEFGADNIEVEFDYSELDDVLECYPQFYHGVDKEGRPVYIELIGKVDPNKLVQVTTIDRYVKYHVKESEKCLQMRFPACSIAAKRHIDSCSTILDVQGVGLKNFSKDARELIMRLQKINNDNYPETLHRLYIINAGQGFKMLWGTIKSFLDPQTASKIHRLGLFYCHKYCSLVPILIILFNSCXFSELPDFLGGKCRCEEHGGCIKSDKGPWKDPDIIKRVLNGEANYGRKILAISSVDGKKICYINPRHLTVKKCSDASAESSSEMEDVSSPIASVNPIINPHLTPVDEARSCTSGNTSTSGAPPRVEXXIPVVDKAVDTXXAGPSTSSMAFNSGLYMTPNITMELGGLRNRITAWLIVLIVSFVAVLRSVPSRVTASLSSQAISQFXPPSSPGFTENSTHSSVLRRLGELEEKLQELEAKQSQMPPDREELLNGAIHRVDALEAELISTKKMLYDALMRLDELLAYADQQKNIQFRVSYMQKKRFCF

SEQ ID NO: 22863 - protein, 617 aa, Oryza sativa
  unsure (1)..(617): unsure at all Xaa locations
MSGPLDRFARPCFEGFTHNDEKKEIRSDADNSEGEKKTKIGSFKKKAINAGNKFRHSLRRRSKKKNEXXRGSIEDIRDVQDLQAVDAFRQCLVDEDLLPQQHDDYHTMLRFLKARKFDVEKAKSMWSDMLKWRKEFGADNIEQEFDYTEADEVMKYYPQFYHGVDKEGRPIYIELIGKVDANKLMQVTTIERYVKYHVKEFERCFQMRFPACSIAAKRPIDSSTTILDVQGVGLKNFSKAARDLITRLQKIDNDNYPETLRRMYIINAGQGFKMLWSTVKSFLDPKTASKIHVSQLYIFFIHPNFCPLHVFSELPEFFGGKCKCEAFGGCKKSDKGPWKDPNIIKRVLNGEANYGRQIVTISSTDGKIIRYAGPQYPTVKGSDGSAESGSEVEDGASPMASRNLITNPLLTPVHEEAKIGSTWIYTASPSIIEESIPVVDKVVDDGWGTEPEPELSHDSRXGSSPSRSLPITFDGLWTQVITWLTVLIVSLFAMVRSVPSRMAKRFSSQSTDHDHSYVEYPQEADEKDVLSSMVRRLGELEEKVQALETKPSEMPFEKEELLNAAVRRVDALEAELISTKKALYEALMRQDELLAYIDKQDMIKFRVRYSFLTLFFL

SEQ ID NO: 22864 - protein, 390 aa, Oryza sativa
  unsure (1)..(390): unsure at all Xaa locations
KRYQTACKLGLLLFPSKCQFGADQRVWRACSRLTRGKIEGQMXENSEDERRRLSIGSLKKKALNASNKLTHSLKKRGKRKVENRPSFTIEDVRDEEEERAVFSFQQELFSRNLLPDKHNDYHMLLRFLKARKFDTEKAIQMWAEMLQWRKEFGADTILEDFNFEELDEVLVYYPQGYHGVDRQGXPVYIERLGKVEPNKLMHITTVDRYIKYHVQEFERAFHEKFPACSIAAKRHIDSTTTILDVDGVGLKNFSKTARDMLGRMQKIDSDYYPETLHQMFVVNAGNGFKLLWNTVKGFLDPKTASKIHVLSSCLXFNAHCFAIYSQLPEFLGGACTCAAEGGCLKSNKGPWNDPNIMKCLVDLDYLTYYIKTPISLFSACLXIINRTCYI

SEQ ID NO: 22865 - protein, 322 aa, Oryza sativa
  unsure (1)..(322): unsure at all Xaa locations
LGGTVRPNFRRNIVDGIYDQKEEQYVQSLRELLLANNQLPEKFDDYHVLLRFLKMRGFNIVKAKEMFLNMLKWREECAVDAIAKDFKFEEYDAVKRCYPHGFHGVDRFGRPLYIERIGLVDLNKLMQVSSTDRYVKYHISEQEKTLSLRYPACSLVAKKHIGSTTAIFDVKGLGMNNFSKSGRDLFIEIQKIDSNYYPETLNQLYIINAGAGFRALWKVLKACMEARTLAKIQVLGTNYLSTILEAVDPSNLPDFLGGTCTCSATGGCLLQDKGPWTDQEISRKINEQYQLCKKFRNGKXXVVDNNDGNKKRHGINIKLVGX

SEQ ID NO: 22866 - protein, 609 aa, Oryza sativa
  unsure (1)..(609): unsure at all Xaa locations
MNPARARGTGQPLRVYGPGPCTESDRILFVSSRLPRESFPPLKPIAAAAGASLSFWSKIIAQNPRLELLLGRLILESEEGMSGPLDRFARPCFEGFTHNDEKKEIRSDADNSEGEKKTKIGSFKKKAINAGNKFRHSLRRRSKKKNEXXRGSIEDIRDVQDLQAVDAFRQCLVDEDLLPQQHDDYHTMLRFLKARKFDVEKAKSMWSDMLKWRKEFGADNIEEFDYTEADEVMKYYPQFYHGVDKEGRPIYIELIGKVDANKLMQVTTIERYVKYHVKEFERCFQMRFPACSIAAKRPIDSSTTILDVQGVGLKNFSKAARDLITRLQKIDNDNYPETLRRMYIINAGQGFKMLWSTVKSFLDPKTASKIHXXVLNGEANYGRQIVTISSTDGKIIRYAGPQYPTXQNWQHMDLXSASPSIIEESIPVVDKVVDDXXMGQSXXASSSPSRSLPITFDGLWTQVITWLTVLIVSLFAMVRSVPSRMAKRFSSQSTDHDHSYVEYPQEAEYKEVRPPSPAPSYTEKDVLSSMVRRLGELEEKVQALETKPSEMPFEKEELLNAAVRRVDALEAELISTKKALYEALMRQDELLAYIDKQDMIKFRKKKFCF

SEQ ID NO: 22867 - protein, 435 aa, Oryza sativa
MSIEDVRDAEEELAVAAFRDRLAVHALLPDKHDDYHMMLRFLKARKFDSEKAMQMWAEMLRWRKEFGADTILEEFEFDELDDVLRYYPQGYHGVDREGRPVYIERLGKVYPNKLMQITSVDRYIKYHVQEFERAFRERFPACTLAAKRHIDSTTTILDVHGVGLKNFSKTARELVHRMQKIDSDYYPETLHQMYVVNAGSGFKLIWNSVKGFLDPKTSSKIHGMMSDISNAESESDVDEFSLSAVLRSTDYSFLTPVSEEVKGSDSSTFCSCESCDRKGLPDVTPESSQSVQQSSEMVPNQLVSHEHSSTTRWMNNLGNMAISFHGTLTGRTLSNFVRVVGTLMIKILAVFSLFVSRRGNMLENVHPSNVEDEPQPRSATEDNMSACLQRLEKLESLCNHLMSKPPDMPKEKECLLLQSFDRIKTIESDLERTKR

SEQ ID NO: 22868 - protein, 614 aa, Oryza sativa
  unsure (1)..(614): unsure at all Xaa locations
MLMQRRGCCEPMDPVHERIRVTPPPLLPCPLPPPMKRKQKLLFPSPPKQKHQNIPPKSKEKQSISNEPSLSILVPLLSPRIPPPETLVHRRAARLGDSITLRGIEVGPRVGKAKMAGSIDRPCAGFEGIVHDDDKKEWKSDEDNSEGDKKAKAVSFKNRAISAGNKFRRSLRRKRRRXXVGDHVASIEDIRDVKELEAVQRFHQCLHDEGLLPERHDDYHVMLRFLKARKFDIDKAKHMWSEMLRWRKEFGADNIEEFDYSELDDVLECYPQFYHGVDKEGRPVYIELIGKVDPNKLVQVTTIDRYVKYHVKESEKCLQMRFPACSIAAKRHIDSCSTILDVQGVGLKNFSKDARELIMRLQKINNDNYPETLHRLYIINAGQGFKMLWGTIKSFLDPQTASKIHXXVLNGEANYGRKILAISSVDGKKICYINPRHLTSKLPDTSTSGAPPRVEDIPVVDKAVDTXXAGPSTSSMAFNSDSFSLRNITMELGGLRNRITAWLIVLIVSFVAVLRSVPSRVTXXSLSSQAISRENSTHSSVLRRLGELEEKLQELEAKQSQMPPDREELLNGAIHRVDALEAELISTKKMLYDALMRLDELLAYADQQKNIQFR

SEQ ID NO: 22869 - protein, 401 aa, Oryza sativa
  unsure (1)..(401): unsure at all Xaa locations
MTEVLSRPLEHQRDPEEDFEFEEADKVAECYPQGYHGVDKEGRPVYIERLGQINVNRLMQVTTMDRFIKNHVREFEKNFAVKFPACSIAAKCHIDQSTTILDVQGVGMKQFSKAARDLIGQLQKIDGDNYPETLCRMFIINAGPGFRLLWSTVKSFLDPKTTAKIHVLGNKYQSKLLEVIDASELPEFFGGTCQCXXGGCMKADKGPWKDAEILKTLGSAYSCDVPMVEKAIDAXLPEQGIARXECHSNQSDCXXASNGSNPPLYGGIMALVMSIATMLRVSRNMPKKVLGATLGAQSTSKIQAQQLSEISVEAVSVAEYVSSTKRLSDIEEKVIAILTKPAEMPADKEEMLKTAVSRVSALEEELAATKKALQETLERQEEIMAYIEKKKKKKSKRLFRW

SEQ ID NO: 22870 - protein, 302 aa, Oryza sativa
  unsure (1)..(302): unsure at all Xaa locations
WRACSRLTRGKIEGQMXENSEDERRRLSIGSLKKKALNASNKLTHSLKKRGKRKVENRPSFTIEDVRDEEEERAVFSFQQELFSRNLLPDKHNDYHMLLRFLKARKFDTEKAIQMWAEMLQWRKEFGADTILEDFNFEELDEVLVYYPQVDRYIKYHVQEFERAFHEKFPACSIAAKRHIDSTTTILDVDGVGLKNFSKTARDMLGRMQKIDSDYYPETLHQMFVVNAGNGFKLLWNTVKGFLDPKTASKIHVLGTKFHGKLLEVIDASQLPEFLGGACTCAAEGGCLKSNKGPWNDPNIMK

SEQ ID NO: 22871 - protein, 270 aa, Oryza sativa
  unsure (1)..(270): unsure at all Xaa locations
WRACSRLTRGKIEGQMXENSEDERRRLSIGSLKKKALNASNKLTHSLKKRGKRKVENRPSFTIEDVRDEEEERAVFSFQQELFSRNLLPDKHNDYHMLLRFLKARKFDTEKAIQMWAEMLQWRKEFGADTILEDFNFEELDEVLVYYPQGYHGVDRQGXPGLKNFSKTARDMLGRMQKIDSDYYPETLHQMFVVNAGNGFKLLWNTVKGFLDPKTASKIHVLGTKFHGKLLEVIDASQLPEFLGGACTCAAEGGCLKSNKGPWNDPNIMK

SEQ ID NO: 22872 - protein, 206 aa, Oryza sativa
  unsure (1)..(206): unsure at all Xaa locations
AAAAEGGGGEDERRARALSSSSSSLRQRAMSARSSKGAAARQRSSKVMSVSIEDVRDAEEMKSVDAFRQTLVLEELLPARHDDYHMMLRFLRARKFDIDKSKQMWSDMLQWRKEFGSDTILDDFQFEEMDQVLEHYPQGHHGVDRDGXRPVYIEKLGAIDTAKLLQVTSMDRYVKYHVREFERAFAVKFPACSIAAKRHVDQSTTX

SEQ ID NO: 22873 - protein, 447 aa, Oryza sativa
  unsure (1)..(447): unsure at all Xaa locations
XKVDPNKLMHVTTMDRYVRYHVKEFERSFLIKFPACSLAAKRHIDSSTTILDVQGVGLKNFSKTARELIVRLQKIDNDNYPETLYQMFIVNAGPGFRLLWNTVKSFLDPKTTSKIHVLGNKYQSKLLEVIDASELPEFLGGACTCPEYGGCLKAEKGPWKDQNILNIVLSGEAQCARQIVTVSNGEEKIISYAKSKHHTIRGSDTSTAESGSEAEDVTSPKVLRSYISHPKLTPVREEVKMVRATSFSTRMPEYDVPVVDKAVDATWKREVTRKTAFSSKDSSLTSTESSSNGSLDRIVAVLLAVFMAIITLVRSVKDLAAKRLPDKNESEQKYSTLYPDSMPKEEFRPPSPTPGFVEAELFSSVLQRLGDLEEKFLMLQDKPSEMPCEKEELLNAAVRRVDALEAELIVTKKALHEALIRQEELLAYIDSKEVAKAQKKKKAMFCY

SEQ ID NO: 22874 - protein, 247 aa, Oryza sativa
MAGNRGGDAGEGEWLKVAELRATVEAQDPHAKEVDNLTLRRFLRARDHNVEKASAMLLKALRWRREAVPGGSVPEEKVQSDLDDDKVYMGGADRTGRPILLGFPVKNFSAKRDMPKFKSYCVYLLDSICARIPRGQEKFVCIVDLKGWGYSNCDIRAYIAAIEIMQNYYPERLGKALMIHVPYMFMKAWKMIYPFIDNVTRDKFVFVDDKSLQEVLHQEIDDSQIPDTLGGKLAPVSLKNNARINLD

SEQ ID NO: 22875 - protein, 259 aa, Oryza sativa
MDYCKQQERDGHRDDGDVTEWKKVAELRAVVEAQDPACKEEDDYQLRRFLRARDHNIGKASAMLVKYLQWKREVKPGGRAIADEEVRGELAQEKLYMQGYDRQGRPLVYGFGARHFPARRDLDEFKRYVVYVLDRTCARLDGGQEKFAAVADLQGWGYYGNCDIRAYVAALEIMQNYYPERLGRVFLIHVPYVFMAAWKIIYPFIDDNTKKKFVFVADKDLHATLRDAIDDSNLAEDYGGKLKLVSPLINGATESNRRR

SEQ ID NO: 22876 - protein, 247 aa, Oryza sativa
MAGNRGGDAGEGEWLKVAELRATVEAQDPHAKEVDNLTLRRFLRARDHNVEKASAMLLKALRWRREAVPGGSVPEEKVQSDLDDDKVYMGGADRTGRPILLAFPAKHFSAKRDMPKFKSYCVYLLDSICARIPRGQEKFVCIVDLKGWGYSNCDIRAYIAAIEIMQNYYPERLGKALMIHVPYMFMKAWKMIYPFIDNVTRGKFVFVDDKSLQEVLHQEIDDSQIPDTLGGKLAPVSLKNNARINLD

SEQ ID NO: 22877 - protein, 318 aa, Oryza sativa
  unsure (1)..(318): unsure at all Xaa locations
MGAASDDAVKQLALLMDQXNVHQGYPKETLLRFLKAREWNVSKAHKMLVDSLNWRIQNEIDTVLERPIVPVDLYRSIRDSQLVGLSGYTKEGLPVFAVGVGQSTYDKASVHYYVQSHIQINEYRDRVILPMLTEKFGRPVTTCVKVLDMTGLKLSALSQMKMLTSISTVDDLNYPEKTETYYVVNVPYIFSACWKVVKPLLQERTKKKVKVLHGCGRDELLKIMDYSSLPHFCRREGSGSSKHSSTDADDCYSLDHPFHKELYGHIEELASCKELIKMGSLHVSIPEPDPDDAKIVEVIQAEFQKIGEQNGSANGHKV

SEQ ID NO: 22878 - protein, 336 aa, Oryza sativa
  unsure (1)..(336): unsure at all Xaa locations
MAAASEEAIKQFSALMELLDEPLKTTFQHVHQGYARGTLVRFLKAREWNVPKAHKMLMDCLNWRIQNGIDSVLAKPIVPSDLYRTIRDTLLVGLTGYSKQGQPVYAFGVGLSTLDKASVHYYVQSHIQMNEYRDRVVLPKASKMFGKQINTCLKVMDMTGLKLSALNQIKMLSTITAIDDLNYPEKTETYFIVNAPYVFSACWKVVKPLLQERTKRKIKVLYGSGRDELLKVMDYEALPNFCKREGSGSSNDSSDGVXXCYSYDHPFHQELYNYIKQQALNEDFIGPIKQGSMHVDVPTPDLEEAKIMETIESELHKFSGANGLSHSFNKIKIEGP

SEQ ID NO: 22879 - protein, 242 aa, Oryza sativa
  unsure (1)..(242): unsure at all Xaa locations
XTRPPACSIAAKRHVDQSTTILDVSGVGYKNFNKAARDLIGRLQKVDGDNYPETLCRMFIINAGQGFRLLWNTVKSFLDPKTTAKIHVLGNKYQSKLLEVIDPSELPEFLGGTCTCEGGCMRSDKGPWKDPEIIKMVQCGMGRCGFNSSGHTEADEKMITEDDIVALPKKQESIRRDSVDSPKIPREKIEHPHAEKLALARDMYASLPDAYKHGDAGDRQVVTGFMAFVMGVVAMFRVGKIX

SEQ ID NO: 22880 - protein, 327 aa, Oryza sativa
MGAASDDAVKQLALLMDQVEAPLRRTFQNVHQGYPKETLLRFLKAREWNVSKAHKMLVDSLNWRIQNEIDTVLERPIVPVDLYRSIRDSQLVGLSGYTKEGLPVFAVGVGQSTYDKASVHYYVQSHIQINEYRDRVILPMLTEKFGRPVTTCVKVLDMTGLKLSALSQMKMLTSISTVDDLNYPEKTETYYVVNVPYIFSACWKVVKPLLQERTKKKVKVLHGCGRDELLKIMDYSSLPHFCRREGSGSSKHSSTDADDCYSLDHPFHKELYGHIEELASCKELIKMGSLHVSIPEPDPDDAKIVEVIQAEFQKIGEQNGSANGHKV

SEQ ID NO: 22881 - protein, 311 aa, Oryza sativa
MGAAACDAAVEELTRLLDQVEEPLKQTFQNVHQGYPTDTLVRFLKAREWHVSKACDMLVDSLNWRIQNEIDSILEKPIIPVDLYRSIRETQLVGLSGYSKEVHYYVQSHIQINEYRDRIVLPMASKKFGRPISTCIKVLDMTGLKLSALNQMKILTAISTVDDLNYPEKAETYYIVNAPYIFSACWKVVKPLLQERTRKKVHVLHGCGRDELLKIMDHSSLPHFCQREGSGSSKNSSNDVNNCFSLDHPFHQELYHYIDEQALNQELIKQGSLHVNIPDQDPEDAKIVEVIEAEFHKLGEQNGSVNGEHKE

SEQ ID NO: 22882 - protein, 346 aa, Triticum aestivum
  unsure (1)..(346): unsure at all Xaa locations
PAGSGSSLGETRPDSCPETKQDGHAGYLTEDQTAKLEQFRMMLESEGCTDRLDTLTLLRFLRARKFDVEASKAMFLDTEKWRKETKLDETVPVWDYPEKAEINKYYTQFYHKTDKDGRPIYIETLGGIDLNAMYKITTAERMLTNLAVEYERVADPRLPACSRKAGHLLETCCTVMDLKGVSIGKVPQVYSYVKQASVISQNYYPERLGKLYMINAPWGFSTVWSIVKGWLDPVTVSKINILGSGYKGELLKQIPAENLPKAFGGEXXQCEGGCENSDAGPWHEAEFARPAWWEKKQDANVIENKGSEIEEPAKAPEAAPVAEGADATQTAPAPAPAAAXRIGGDA

SEQ ID NO: 22883 - protein, 284 aa, Triticum aestivum
  unsure (1)..(284): unsure at all Xaa locations
XLFARNLLPXKHDDYHMMLRFLKARKFDVEKAAQMWDEMLQWRNEFGTDTILEDFEFHELEEVLQYYPQGYHGVDKDGRPVYIELLGKVEPNKLVQTTTVERYIKYHVQEFERAFREKFPACSIAAQKHIDTTTTILDVHGVGWKNFGKIARDLVRCMQKIDGDYYPETLHQMFIVNAGAGFKLIWSTIKGLLDPKTSSKIHVLGAKYQSRLLEAIDASQLPEFFGGLCTCSNQGGCLRSNKGPWSDPLIMKXSYIAWNHLHXGISCKYRYRRHSYRLCKIACA

SEQ ID NO: 22884 - protein, 345 aa, Triticum aestivum
  unsure (1)..(345): unsure at all Xaa locations
MSGHLDRLARPVSGFEGCSSHDDRRSYERRSDFEISEDEKKTRMGSLKKKAIDASSKLRHSLKKKNRRKSGSRVLSVSIEDVRDLGELEEVEAFRQALILDELLPSRHDDYHMLLRFLKARKFDIEKAKQMWTDMLQWRKEYGTDTIVEDFDYTELDTVLEYYPHGYHGVDKEGRPVYIERLGKVDPNKLINVTTMDRYVRYHVKEFERSFLIKFPACSLAAKRHINSSTTILDVQGVGLKNFSKTARELIMRLQKVDNDNYPETLHQMFIVNAGPGFRMLWSTVKSFLDPKTTSKIHVLGNKCQSKLLEIIDASELPEFLGGTCTCPEYGGCLKAEKGPWKDAX

SEQ ID NO: 22885 - protein, 383 aa, Triticum aestivum
  unsure (1)..(383): unsure at all Xaa locations
APPTRTVAAAAAPPPPPPPDPKSAGKKIPRGVKFSARGPLSRPGVSLGRGIAEPEGVSGPLDRLARPSFEGFTHNDGKKESRSDADNSEGEKKTKIASFKKKAINAGNKFRHSLRRRSKKKNDNQISIEDIRHVQDLQAVEAFRQCLLDEDLLPQQHDDYHMMLRFLKARKFDVEKAKLMWSDMLTWRKEFGTDNIEEFDNAELNEVMKYYPQFYHGVDKDGRPVYVELIGKVDANKVLQVTTIDRYVKYHVEKFXKCVXVRFPAWTLAAGRTLNSCTTILDVQGVGLKNFSKCARELITRLQKIDSDNYPETLCGTYIINAGQGFKMLWGTIKSFLDPKTASKIHVLGTKYQNKLLEIISEIELPESIGGKCMFKNTQVVRD

SEQ ID NO: 22886 - protein, 563 aa, Triticum aestivum
  unsure (1)..(563): unsure at all Xaa locations
RAYQTWAEVLSGPPEHHLSSALDTHYEEKRKSHVEYSEDEKKAMXVSLKKKAMNASQKLRHSMKKXRRSSKVMSISIEDERDPEEVQAVDAFRQLLVLEELLPSQHDDYHMMLRFLKARKFDVEKAKQMWSDMLQWRKEFGTDTLLEGFEFEEADKVAECYPQGYHGVDKEGRPVYIERLGQIDVTKLMQVTTMERFVKNHVKEFEKNFADKFPACSVAAKRHIDQSTTILDVQGVGMKQFSKAARDLIGQLQKIDGDNYPETLGNKYQSKLLEVIDASELPEFFGGTCQCQGGCMTADKGPWKNPEVMKMVHSGAGRCGKLNLESLDAGEKMICADNTVYTKKQDPXXNGQDEWRNPARAQIEHPQLSPVHEELLPALFPNPGSPYSCDVPMVEKAIDAICKSHGLTDDNLALTKAVANASNASNPPMMGGIMALVMSIATMLRLSRNMPRKVIGAAIGAQSTPKTQAQQQSKXXLAEAEYTVSAKRFADLEEKIIALLAKQAEMPADKEELLKAATSRVAALEEELARTNKALQETLERQQEIMEYIEKKKKKKKKQKFHW

SEQ ID NO: 22887 - protein, 396 aa, Triticum aestivum
  unsure (1)..(396): unsure at all Xaa locations
ARPIKTVRHEEASPPPPPPAPKSAPKFRNREVKISAGNEIPRLFASYAPGTDSGPGASLGRSIPEPEGMSGPLDRLATSFEGFTHNDGKKESRSDADNSEGEKKTKIASFKKKAINAGNKFRHSLRRRSKKKNDNQISIEDIRHVQDLQAVEAFRQCLLDEDLLPQQHDDYHMMLRFLKARKFDVEKAKLMWSDMLTWRKEFGTDNIEEFDYAELNEVMKYYPQFYHGVDKDGRPVYVELIGKVDANKVLQVTTIDRYVKYHVKEFEKCFQMRFPACPIAAKRHLDSCTTILDVQGVGLKNFSKCARELITRLQKIDSDNRPASVRPSXXIINAGQGFKMLWGTIKSLLDPKTASXIHVLGTKYHYKLLEIIDGGXELPESIGGKCMFKNTQVVRD

SEQ ID NO: 22888 - protein, 230 aa, Triticum aestivum
  unsure (1)..(230): unsure at all Xaa locations
RGSRXFVFEELDEVLSYYPQGYHGVDRQGRPVYIERLGKVDPNKLMNITTVDRYIKYHVQEFERAFLDKFPACSIAAKRHIGSTTTILDVEGVGFKNFSKTAREMLTRMQKIDSDYYPETLHQMFVVNAGGGFKLLWNSVKGFLDPKTVSKIHVLGTKFQSKLLEVIDGSQLPEFLGGTCTCAGEAGCLKSNKGPWNDPNIMKVAHNKEAKFSRHTRRLSEIEQRRGSFX

SEQ ID NO: 22889 - protein, 268 aa, Zea mays
  unsure (1)..(268): unsure at all Xaa locations
SLYSAVFLTAVSFSFSPPPSSTPPSTNYPSQWPRTPSTITXDFPAQGAEKQDGHAGYLTEDQTAKLEQFRMMLESEGCTDRLDTLTLLRFLRARKFDVEASKAMFLDTEKWRKETKLDETVPVWDYPEKAEINKYYTQFYHKTDKDGRPIYIETLGGIDLNAMYKITTAERMLTNLAVEYERVADPRLPACSRKAGHLLETCCTVMDLKGVSIGKVPQVYSYVKQASVISQNYYPERLGKLYMINAPXWGFSTVWSIVKGWLDPVTVX

SEQ ID NO: 22890 - protein, 591 aa, Zea mays
  unsure (1)..(591): unsure at all Xaa locations
MSATIDRLATPSHEGRAHSDEKRECNSDEENSEGERKPKKDSFKKRAVTTGYRFRHSLRRKSKTKNDNHIASIEDIRDVQELEIVERFRQCLLDDGLLPEHHDDYHTMLRFLKARKFNIDKAKHMWSEMLRWRKEFGADNIEEFDYTELDEVVKYYPQFYHGVDKDGRPVYIELIGKVDTNKLVQITTIDRYLKYHVKEFERCLQMRFPACSIAAKRHIDSSTTILDVKGVSLKNFTKDARELIMRLQKINNDNYPETLYQLYIINAGQGFKILWGTIKSFLDPETASKIHVLGNKYQTKLLEIIDGSELPEFLGGKCRCEEYGGCPKSDKGPWKDPEIFKRVINGEANYGRQVLAVSSINQKEVGXXTEHTTVEDVSSSTALVDPIISPNLTHVDELKFQGHASSSDAPPIIGDSIPAAGKVMDACSNPRNSSTPSSSGSFSLRNIPATLGGLKTRIVAWSTFVILTLSAFLCSVLSIVTKRXXQTRPSHVTTIVXDFHQGYMGNGTLTSVLTRLGELEEKVQALEAKPPQVPFEKEELLHTAVYRVDVLEAELISMKKALYETLIRQDELLAYIDQQQTAKFCRQKFCF

SEQ ID NO: 22891 - protein, 552 aa, Zea mays
  unsure (1)..(552): unsure at all Xaa locations
XELQAVEAFRQALLLDELLPARHDDYHMMLRFLKARKFDIDKAKQMWMDMLHWRREYGTDTILEDFDYTELDTVLQYYPHGYHGVDKEGRPVYIERLGKVDPSKLMNVTTMDRYVRYHVKEFERSFLIKFPACSVAAKRHIDSSTTILDVQGVGLKNFSKTARELIQRLXKIDNDNYPETLYQMFIVNAGPGFRLLWNTVKSFLDPKTTAKIHVLGNKYQSKLLEIIDASELPEFLGGTCTCPEYGGCLKAEKGPWKDPNILKIVQSGEVHCARQIVTISNGEEKFITYAKPKHHSMRGSDTSTAESGSEADDAISPKALRSYIQHPKLTPVREEVKIVRATSFSIRLPEYDVPVVDKAVDATWRREQPRKIPFMPQDADSSVKTMSRPSDSSCKIVATLMACLMAIVMLVRLVKDLVTRRLPYKGGSEEIHSTLYPDPIQKEEFRPPSPIPGFAEADLFAVVLQRLGELEEKVQMLQEKPSEMPCEKEELLNAAVRRVDALEAELIVTKKALHEALIRQEELLAYIDRKEIAKAQWSCFLLQRKKKAMLCY

SEQ ID NO: 22892 - protein, 705 aa, Zea mays
  unsure (1)..(705): unsure at all Xaa locations
TPTKREASSSPCPRACVRAWPEAGWEEDLTPSRVAVLGAAARDRGPTRLPPPLGTRSSWRSCTCRLPVLCNLQNVSASSVNXSMEGLLTLDDWKERRSDVDNSEDERRRLSIGSLKKKALNASNKLTHSLKKRGKRKVEHRASSFTIEDVRDEQEERAVFTFQQKLLDMNLLPDKHNDYHSLLRFLKARKFDTEKAIHMWAEMLQWRKESGADTILEDFSFEELDDVLCYYPQGYHGVDRQGRPVYIERLGKVEPNKLMHITTVDRYMKYHVQEFERAFRDRFPACSVAAKRHIDSTTTILDVDGVGLKNFSKTARDMLSRMQKIDSDYYPETLHQMFVVNAGSGFKLLWSSVKGFLDPKTASKIHVLGTKFQNKLLEVIDASQLPEFLGGTCTCAAVGGCMRSNKGPWNDPDIMKLAHNKEAKFTRHTRRLSEIEQGRSSFARLHLLKGRNSDTSTVESGSEIDDLGAPIMRSTVGCSRLAPVREEMQMRARDSAAYYSCDDHFVVVDKTVDYGRGGSPSDKSSASEVRTHVRPLDASXSSPRGRSLKXXRRATVVPEEVSDEGVFRRFVRLLLAXXIVKVFAFFHIVRSQQETRVNNLLPPAEPELISDDHPAVETFKDHISPVIERLQRLEGKVDELGSKPPAIPVEKERSLLESWDRIKCIESDLERTKKVLQATVRKQLESAESLEEVIRSSLPRRRFCL

SEQ ID NO: 22893 - protein, 359 aa, Zea mays
  unsure (1)..(359): unsure at all Xaa locations
MSVSHADEHEISLCDPSSEDDRRRRKIGSLPLKAIHALRKKRARRRVTDFRFPAAISIEDVRDAEEERAVAAFRDRLAAHRLLPDKHDDYHMMLRFLKARKFDSDKAMQMWSEMLRWRKEFGTDTILEDFEFDELNDVLHYYPQGYHGVDREGRPVYIERLGKVDPNKLMQITSVDRYIKYHVQEFERAFRERFPACTLSAKRHIDSTTTILDVHGVGFKNFSKTARELVQRMQRIDSDYYPETLHQMYVVNAGSGFKLIWNSVKGFLDPKTSSKIHVLGSNYQSRLIEVIDSSELPKFLGGSCTCSEKGGCLRSNRGPWNDPVIMKKSTDHSLLTPVHEEVKGSDTSIXFVVLAVSIS

SEQ ID NO: 22894 - protein, 639 aa, Zea mays
  unsure (1)..(639): unsure at all Xaa locations
MSGHLDRFARPCFEGRSSHDECRDHKSDFEVSEDEKKTRMGSLKKKAIDASTKIRHSLKKXXRRKSGSRVLSVSIEDVRDLEELQAVEAFRQALLLDELLPARHDDYHMMLRFLKARKFDIDKAKQMWMDMLHWRREYGTDTILEDFDYTELDTVLQYYPHGYHGVDKEGRPVYIERLGKVDPSKLMNVTTMDRYVRYHXVKEFERSFLIKFPACSLAAKRHIDSSTTILDVHGVGXLKNFSKTARELIQRLQKIDNDNYPETLYQMFIVNAGPGFRLLWNTVKSFLDPKTTAKIHVLGNKYQSKLLETIDASELPEFLGGTCTCPEYGGCLKAEKGPWKDPNILKIVQSGGFHCARQIVTISNGEEKFITYAKPKRHTMRGSDTSTAESGSEADDAVSPKALRSYISHPKLTPVREEVKMFRATSFSTRLPEYDVPVVDKAVDATWKREQPRKAPSVPQDADSSVKTASKPSGRPCKIAATLMACLMAIVMLVRSVKDLATMRLSSKGGSEESYCTLYPDSVQKEEFRPPSPFPGFAEADLFAVVLQRLGELEEKVQMLQEKPSEMPCEKEELLNAAVRRVDALEAELIVTKKALHEALIRQKELLANIDSKEIARAQVPXCYIMMFSYPCYNPCISL

SEQ ID NO: 22895 - protein, 639 aa, Zea mays
  unsure (1)..(639): unsure at all Xaa locations
ENESDRPEVAAVPRRGERTGGHGRRRPGAIPPGRDPAAEESGHFARRRRTRTAGDLAPRVAAQLQRHTTVPAVPGAVRSSHLPLCLPALPVVSHAEDIEISLCDGNSEDERRRRKIGSLRRKAIHALKKRGRRRVDFRFPAGXAISIEDVRDAEEERAVASFRDRLAAHGLLPDKHDDYHMILRFLKARKFEADKAMQMWSEMLKWRKEFGTDTILEDFDFAELDDVLRYYPQGYHGVDREGRPVYIERLGKVDPNKLMQITSVDRYIKYHVQEFERAFRERFPACTLAAKRHIDSTTTILDVQGVGFKNFSKTARELVHRMQKIDSDYYPETLHQMFVVNAGSGFKWIWNSVKGFLDPKTSSKIHVLGSNYQSRLLEVMDSSELPEFLGGSCTCSDKGGCLGSNKGPWNDPYILKKVSDYGCLTPVHEEVKGTDRVTYFSYDDQSHPDMAPESYHGARRATGMEHHKPMADFSQYSANRRPGNSALNVNGTAAQSGWENVVKLVVTTLVKLFYFIRLFLSTAERRLESIHRPAPPAAPAAAEEPRPRAISDEEVCACLQRLDNLESMCSHLAAKPPQIPEDKELILLSSFERIRSVEADLERTKRVLNATVVKQKALVETLESVQESSSRVKKRMFCS

SEQ ID NO: 22896 - protein, 436 aa, Zea mays
  unsure (1)..(436): unsure at all Xaa locations
MSATIDRLATPSHEGRAHSDEKRECNSDEENSEGERKPKKDSFKKRAVTTGYRFRHSLRRKSKTKNDNHIASIEDIRDVQELEIVERFRQCLLDDGLLPEHHDDYHTMLRFLKARKFNXVDGAKQMWSEMLRWRKEFGADDIEEFDYTELDEVVKYYPQLYHGVDKGGRPIYIELIGKVDTYKLVQITTIDRYIKYHVKEFERCLQMRFPACSIAAKRHIDSSTAILDVKGVGLKNFTKVARELIMRLQNINNNNYPETLQQLCIINAGQGFKMLWGTIKSFLDPETASKIHVLGNKYQTKLLEIIDDSELPEFLGGKCRCEEYGGCLKSNKGPWKDPEIVKKVINGEANYVRQVIAVSNINQKEVSCTEHSTEEKVNDASVESISEVEDVSSSTALMDHIISPNLTFVDESKFRGHAXSSDAPXXIRGSXPVASX

SEQ ID NO: 22897 - protein, 629 aa, Zea mays
  unsure (1)..(629): unsure at all Xaa locations
MSGHLDRFARPCFEGCSSHDERRDHKSDFEVSEDEKKTRISSLKKKAIDASTKIRHSLKKXXRRKSGSRVLSVSIEDVRDLEELQAVEAFRQALLLDELLPARHDDYHMMLRFLKARKFDIDKAKQMWIDMLQWRREYDTDTIVEDFEYTELSTVLQYYPHGYHGVDKEGRPVYIERLGKVDPSKLMNVTTMDRYVRYHVKEFERSFLIKFPACSLAAKRHIDSSTTILDVHGVGXLKNFSKTARELIQRLQKIDNDNYPETLYQMFIVNAGPGFRXLLWNXTVKSFLDPKTTAKIHVLGNKYQSKLLETIDASELPEFLGGTCTCPEYGGCLKAEKGPWKDPNILKIVQSGGVHCARQIVTISNGEEKFITYAKPNRHAMRGSDTSTAESGSEADDAVSPKALRSYISHPKLTPVREEVKMVRATSFSTRLPEYDVPVVDKAVDATWKREQPRKAPFVPQDADSSVKTASKPSGRPCKIAATLMACLMVIVMLVRSVKDLATMRLSSKGGSEESYCTLYPDSVQKEEFRPPSPFPGFAEADLFAVVLQRLGELEEKVQMLQEKPSEMPCEKEELLNAAVRRVDALEAELIVTKKALHEALIRQEELLANIDSKEIARAQRKKKTMFCY

SEQ ID NO: 22898 - protein, 558 aa, Zea mays
  unsure (1)..(558): unsure at all Xaa locations
MSVSHAQDIEISLCDGNSEDERRRRKIGSLRRKAIHALKKRGRRRVDSRFPPPAISIEDVRDAEEERAVASFRERLAAHGLLPEKHDDYHMMLRFLKARKFEAEKAMQMWSEMLKWRKEFGTDTILEDFDFEELDDVLRYYPQGYHGVDRQGRXVYIERLGKVDPNNLMQITSVDRYIKYHVQEFERAFRERFPACTLAAKRHIDSTTTILDVQGVGFKNFSRTARELVNRMQKIDSDYYPETLHQMFVVNAGSGFKWIWNSVKGFLDPKTSSKIHVLGSNYQSRLLEVIDSSELPEFLGGSCTCSDKGGCLGSNKGPWNDPYILKLIHNLEAGCMRETTKPVSEGGERSSSSFRLEQMKWQGMLSDTSNAESGSDVDDFGPSFVHKVSGYGCLTPVREEVKGTDCATYLSCDDQSHPDMVPEFYHGVQRTTEMVQKQMADFRQYSTNRRPSELGNGSLNANGTAAAQRGWEDVAKLVVTALIKLFSFIRLFLSRAAESRLEKVRRTAPPPAAEKPRPRAISDEEVCACLQRLDNLESMCSHLAAKPRRSQRTRNSFC

SEQ ID NO: 22899 - protein, 619 aa, Zea mays
  unsure (1)..(619): unsure at all Xaa locations
MSAPLDRLARPCFEGFVHNDERKESRSDADNSEGDKKTKIGSFKKKAINAGNKFRHSLRRRSKKKTERGDSIKDIRDIKELQDVETFRQCLIDEDLLPPQHDDYHMMLRFLKARKFDVEKAKNMWSDMLKWRKEFGVDKIEEFEYAELDEVKKYYPQFYHGVDKEGRPVYIELIGKVDANKLVQVTTLDRYVKYHVKEFERCFQIRFPACSIAAKKHIDSSTTIFDVQGVGFKNFSKSARELITRLQKIDNDNYPETLCQMYIINAGQGFKMLWSTIKSFLDPKTASKIHVLGNKYQHKLLEIIDECELPEFLGGKCKCIXXGCERSDKGPWKDPNIIKRVLNGEANYGRQIVTISSTDGRIVSYAWPVHPNRKGSDASAESGSEVEDVTSPTASRNLITHPILTPVHEESKLSAHGSSSVVHASIGENIPVVDKIVDDGWGSPRSSPQAASSGSLSLRNLHGTFQGLRAQTITWLTFLMMTLFAMLCSVPSKMARRISNQSGKHDDYHVKYPQEQECKEEFRPPSPAPSYTEKDVISSMLRRLGELEDKVQVLETKPSEMPFEKEELLNAAVRRVDALEAELISTKKALYDALMRQDELLAYIDRQELIKFRKKKFCF

SEQ ID NO: 22900 - protein, 293 aa, Zea mays
MSFRSIEQLLRRNSKTKISRNIVDRNHDQKEEQLVQSLRELLLASKQLPDKFDDYYVLLRFLKMRGFNILKAKEMFLNMLKWREDCSVDAIANDFKFEEYDAVKRCYPHGFHGVDRFGRPLYIERVGSVDLSKLMQVTTIDRYVKYHISEQEKTISLRYPVCSLVAKKHIASTTAIFDVKGLGLNNFSKSAREMFAEIQKIDSNYYPETLNQLYIINAGTGFRALWKVLKTFMEARTLAKIQVLGTNYLNTVLEAVDPSNLPEFLGGTCTCPTGGCLLQDKGPWTDPAVKKKK

SEQ ID NO: 22901 - protein, 373 aa, Zea mays
  unsure (1)..(373): unsure at all Xaa locations
EQSIVSLLLDREPHSLGVRVVAXGSEIGIPTEELHPRTSEKGMSATIDRPTPSHEGRAHSDEKRECNSDEENSEGERKPKKDSFKKRAVTTGYRFRHSLRRKSKTKNDNHIASIEDIRDVQELEIVERFRQCLLDDGLLPEHHDDYHTMLRFLKARKFNIDKAKHMWSEMLRWRKEFGADNIEEFDYTELDEVVKYYPQFYHGVDKDGRPVYIELIGKVDTNKLVQITTIXDRYLKYVVREFERCLQMRFPACSIAAKRHIDSSTAILDVKGVGPKNFPKVARELIMRLQKINHGHYPETLQQLCIINAGQGFKMLWGTIKSFLDPETASKIHVLGNKYQTKLLEIIDDSELPEFLGGKCRXLLLAVKSMEVV

SEQ ID NO: 22902 - protein, 619 aa, Zea mays
  unsure (1)..(619): unsure at all Xaa locations
MSGPLDRFARPCFEGFVHNDERKESRSDADNSEGDKKTKIGSFKKKAINAGNKFRHSLRRRSKKKTERGDSIKDIRDVKELQDVETFRQCLIDEDLLPPQHDDYHMMLRFLKARKFEVEKAKSMWSDMINWRKEFGVDKIEEFDYTELDEVTEYYPQFYHGVDKEGRPVYIELVGKVDANKLIQVTTLDRYVKYHVKEFEKCFQMKFPACTIAAKKHIDSSTTILDVQGVGFKNFSKSARELITRLQKIDSDNYPETLCRMYIINAGQGFKMLWSTIKSFLDPKTASKIHVLGNKYQHKLLEIIDECELPEFLGGKCNCIXXGCQRSDKGPWKDPNIIKRVLNDEANYGRQIVTISSIDGKIIRYARPDHPTRKGSDASAESGSEVEDVTSPTASRNLITHPILTPVHEESKLSPHGSTFVAHASIEENIPVVDKVVDDGCTPRGSLQASSGSLPSRXXTHGTFEGLRVQAVAWLTFLITALFATLCSVPSKMARRISSQSSKHDDYRGEYPQEEEEHKEEFRPPSPAPSYTEKDVLSSMLRRLGELEGRVQVLETKPSEMPFEKEELLNAAVRRVDALEAELISTKKALYDALMRQDELLAYIDRQELIKFRKKKFCF

SEQ ID NO: 22903 - protein, 567 aa, Zea mays
MAEVLSGSHEHRLSSALDGHYDEKRKSNVEYTEDEKKAVIAALKKKALSASQKFRHSMKRGRKSSKVMSISILDEREPEEVQAVDAFRQLLVLEELLPSQHDDYHMMLRFLKARKFDIEKAKQMWSDMLKWRKEFGADTILEEFEFEEADKVAECYPQGYHGVDKEGRPVYFERLGQIDVNRLMQVTTMDRFVKNHVKEFEKNFAVKFPACSIAAKHHIDQSTTILDVQGVGMKQFSKAARELIGMLQKIDGDNYPETLGNKYQSKLLEVIDASELPEIFGGTCRCEGGCMKADKGPWKDPEIMKMVQSGDGRCGSLGTASFEAPEKMICEDDTYPKKQALFDGETQLAGDEHSQSQKISRGRIEHPHVSPLHEELIPTSIHTPGSPYSCDVPMVEEAIDAICKSHGTPPDEKIAITKAIINVSNGSKPPLFAGIIALVMSIATMVRLTRSMMPGKVLGAAIGAEGKSKVQERQRSKLSEEAVEEAEDAVSAKRLSELEEKVIALLTKPASMPADKEEVLQAAVSRVSALEEELAATKKTLQETLERQLEIVAYIEKKKKSKRFFRW

SEQ ID NO: 22904 - protein, 591 aa, Zea mays
  unsure (1)..(591): unsure at all Xaa locations
MSASFGRLAPPRHKGRAHRDEKRXRCSEEGNXEEERKPKXDSCKQRAVTTGYNFTHSLRTXRKKGYQTRPAHVTTIVLTSMKDIWEMAPLHPYXHGLVSWRRRYKHLKQSHPKCHLLRRDSYIQMWSELLRWKLNFSIKKTLNXXHSFVDEVVKYYPQFYHGVDKDGRPVYIELIGKVDTYKLVQITTIDRYLKYHVKEFERCLQMRFPACSIAAKRHIDSSTTILDVKGVSLKNFTKDARELIMRLQKINNDNYPETLYQLYIINAGQGFKILWGTIKSFLDPETASKIHVLGNKYQTKLLEIIDGSELPEFLGGKCRCEEYGGCPKSDKGPWKDPEIFKRVINGEANYGRQVLAVSSINQKEVGXXTEHTTVEDVSSSTALVDPIISPNLTHVDELKFQGHASSSDAPPIIGDSIPAAGKVMDACSNPRNSSTPSSSGSFSLRNIPATLGGLKTRIVAWSTFVILTLSAFLCSVLSIVTKRXXQTRPSHVTTIVXDFHQGYMGNGTLTSVLTRLGELEEKVQALEAKPPQVPFEKEELLHTAVYRVDVLEAELISMKKALYETLIRQDELLAYIDQQQTAKFCRQKFCF

SEQ ID NO: 22905 - protein, 445 aa, Zea mays
  unsure (1)..(445): unsure at all Xaa locations
ERRRAARAGPPRRAXFSAQATHEDFDFAELDDVLRYYPQGYHGVDREGRPVYIERLGKVDPNNLMQITSVDRYIKYHVQEFERAFRERFPACTLAAKRHIDSTTTILDVQGVGFKNFSRTARELVNRMQKIDSDYYPETLHQMFVVNAGSGFKWIWNSVKGFLDPKTSSKIHVLGSNYQSRLLEVIDSSELPEFLGGSCTCSDKGGCLGSNKGPWNDPYILKKVSDYGCLTPVHEEVKGTDRVTYFSYDDQSHPDMAPESYHGARRATGMEHHKPMADFSQYSANRRPGDSALNVNGTAAQSGWENVVKLVVTTLVKLFYFIRLFLSTAERRLESIHRPAPPAAPAAAEEPRPRAISDEEVCACLQRLDNLESMCSHLAAKPPQIPEDKELILLSSFERIRSVEADLERTKRVLNATVVKQKALVETLESVQESSSRVKKRMFCS

SEQ ID NO: 22906 - protein, 330 aa, Zea mays
  unsure (1)..(330): unsure at all Xaa locations
ALGDEAPREASRSHQTLRAAAPSLLIVISGQWIDLTSEATFLGAPPPSEPSRSDPDPVLGLPCAPNQXSGSVIQRGSAWSSELVLYRMSEGNVDSIQISVSNDERRNRADAEISEDEPRHTRMRSLKKKALHASTRLTHSLKKRGKRKVDCRVPRIAIEDVRDAEEEQAVNSFREVLFARGLLPVKHDNYHTMLRFLKARKFDFEKAAQMWADMLQWRKEFGTDTIFEDFEFHELEEVLQYYPHGYHGVDKEGRPVYIELLGKVEPNKLMQITTVERYIKYHVQEFERVFREKFPACSISAKRHIDTTTTILDVHGVPKKNHQXSCRSTX

SEQ ID NO: 22907 - protein, 189 aa, Zea mays
  unsure (1)..(189): unsure at all Xaa locations
XPGSTHASGDAEEMKSVDAFRQTLVLEELLPARHDDYHMMLRFLRARKFDIDKSKQMWSDMLQWRKEFGSDTILDDFQFEEMDQVLEHYPQGHHGVDRDGRPVYIEKLGAIDTAKLLQVTSMDRYVKYHVREFERAFAVKFPACSIAAKRHVDQSTTILDVSGVGYKNFNKAARDLIGRLQKXDGDNYX

SEQ ID NO: 22908 - protein, 334 aa, Zea mays
  unsure (1)..(334): unsure at all Xaa locations
RLLRSPRPQRRILRDARAPVSAPCPPPTLPHPRLPAKIDQGSDALRQGLPAGGRPCAGATSRQRALEPPELLLTTHGNLPSVTATENADALLGQGLLVARLKPHRLLQDFVFDELDDVLRYYPQGYHGVDRESQPVYIEKLGKVDPNKLMQITSVDRYIKYHVQEFERAFRERFTACTLAAKRHIDSTTTILYVQGAGFKNFSRTARELVNRMQKIDSDYYPETLHPMFVVNAGSGFKWIWNSVKGFLDPKSSSXIHVLGSKYQSRLLEVIDSSELPEFLGGSCTCSDKGGCLGSNKGPWQPPLVVHAHVGQGWLPWIEQRAMEXSLYIEADPX

SEQ ID NO: 22909 - protein, 248 aa, Zea mays
  unsure (1)..(248): unsure at all Xaa locations
MSVSHAQDIEISLCDGNSEDERRRRKIGSLRRKAIHALKKRGRRRVDSRFPPPAISIEDVRDAEEERAVASFRERLAAHGLLPESEKHDDYHMMLRFLKARKFEAEKAMQMWSEMLKWRKEFGTDTILEDFDFEELDDVLRYYPQGYHGVDRQGRPVYIERLGKVDPNNLMQITSVDRYIKYHVQEFERAFRERFPACTLAAKRHIDSTTTILDVQGVVCERFSLSCANRTQICSVXXSFFLIWLYSA

SEQ ID NO: 22910 - protein, 279 aa, Zea mays
  unsure (1)..(279): unsure at all Xaa locations
KFRLLVHGSSITVLFSQMAGCSCRRFXARVLFRGRIPVPADGMSGPLDRFARPCFEGFVHNDERKESRSDADNSEGDKKTKIGSFKKKAINAGNKFRHSLRRRSKKKTERGDSIKDIRDVKELQDVETFRQCLIDEDLLPPQHDDYHMMLRFLKARKFEVEKAKSMWSDMINWRKEFGVDKIEEFDYTELDEVTEYYPQFYHGVDKEGRPVYIELVGKVDANKLIQVTTLDRYVKYHVKEIEKCFQMKFPACTIAAKXHIDSSTTIXLDVQGVGFKNFX

SEQ ID NO: 22911 - protein, 211 aa, Zea mays
  unsure (1)..(211): unsure at all Xaa locations
MSVSHAEDIEISLCDGNSEDERRRRKIGSLRRKAIHALKKRGRRRVDFRFPPAAISIEDVRDAEEERAVASFRDRLAAHGLLPDKHDDYHMMLRFLKARKFEADKAMQMWSEMLKWRKEFGTDTILEDFDFAELDDVLRYYPQGYHGVDREGRPVYIERLGEVDPNKLMQITSVDRYIKYHAQEFERAXFRERVPACTLAGQRHIDSTTTX

SEQ ID NO: 22912 - protein, 251 aa, Zea mays
MANAGGGAAGEGEWLKVAQLRALVQEDHRAKEVDNLTLRRFLRARGHNVDKAAAMLLKFLRWRAEAAPGGGTVREEQVRGELEQDKIYMGGVDRTGRPIIVGLLAKHYSANRDMAEFKSFVVYFFDKICARIPRGQEKFLAIMDLKGWGYANFDVRAYIAAIEIMQNYYPERLGKALMINVPYIFLKVWKTMIYPFIDANTRDKFVFVDDKSLRETLRREIDESQLPEFLGGKMPLVSLKDYAQQPQPVCE

SEQ ID NO: 22913 - protein, 186 aa, Zea mays
  unsure (1)..(186): unsure at all Xaa locations
MSVIHADDIEISLCDGNSEDERRRRKIGSLRRKAIHALKKRGRRRVDFRFPPAISIEDVRDAEEERAVSAFRERLAAHGLLPEKHDDYHMMLRFLKARKFDAEKAMQMWADMLRWRKEFGADTILEDFEFDELDEVLCHYPQGYHGVDREGRPVYIERLGKVDPNKLMQITSVDRYIKYHVQEFXX

SEQ ID NO: 22914 - protein, 184 aa, Zea mays
  unsure (1)..(184): unsure at all Xaa locations
XHPSRRNLVLTXXRGIRLHLKEFERCLQMRFPACSIAAKRHIDSSTAILDVKGVGLKNFTKVARELIMRLQNINNNNYPETLQQLCIINAGQGFKMLWGTIKSFLDPETASKIHVLGNKYQTKLLEIIDDSELPEFLGGKCRCEXDGRCLKSNKGPWKDPDIVKVINGEADYVRHVIAVSNINX

SEQ ID NO: 22915 - protein, 251 aa, Zea mays
MANAGGGAAGEGEWLKVAQLRALVQEDHRAKEVDNLTLRRFLRARGHNVDKAAAMLLKFLRWRAEAAPGGGTVREEQVRGELEQDKIYMGGVDRTGRPIIVGLLAKHYSANRDMAEFKSFVVYFFDKICARIPRGQEKFLAIMDLKGWGFANCDVRAYIAAIEIMQNYYPERLGKALMINVPYIFLKVWKTMIYPFIDANTRDKFVFVDDKSLRETLRREIDETQLPEFLGGKMPLVSLKDYAQQPQPVCE

SEQ ID NO: 22916 - protein, 251 aa, Zea mays
MANAGGGAAGEGEWLKVAQLRALVQEDHRAKEVDNLTLRRFLRARGHNVDKAAAMLLKFLRWRAEAAPGGGTVREEQVRGELEQDKIYMGGVDRTGRPIIVGLLAKHYSANRDMAEFKSFVVYFFDKICARIPRGQEKFLAIMDLKGWGYANCDVRAYIAAIEIMQNYYPERLGKALMINVPYIFLKVWKTMIYPFIDANTRDKFVFVDDKSLRETLRREIDESQLPEFLGGKMPLVSLKDYAQQPQPVCE

SEQ ID NO: 22917 - protein, 251 aa, Zea mays; identical to SEQ ID NO: 22916

SEQ ID NO: 22918 - protein, 300 aa, Zea mays
  unsure (1)..(300): unsure at all Xaa locations
XEKHMISSMLRRIGLVGVSVVRQDFECTELNTILXYYPHGHHGVGKEGRHVYIERLRKVDPRKLMNVTTMDHYVRYHVKEFERSFLIKFLAWSLVAKKHIDFSTTILDVHDMGLKNFSKTARKIIIQRLQKIDNDNYPETLYQMFIINAGPGFRLXWNTLKSFLDPKTTAKIHILGNKYQSKLLEXFDASEMSEFLGGTCTYPEYGGCLKAEKGQWXDPNILKACTNGGVHCARQIVTISNGEEKLVFMQIEVPCMRGSGTSTAESGSEVDDAVSVQALRTXQHPKLTRVREEAKPVDAT

SEQ ID NO: 22919 - protein, 233 aa, Zea mays
  unsure (1)..(233): unsure at all Xaa locations
XALQVTSMDRYVQYHVREFERAFAVKFPACSISAKKHVDQSTTILDVSGVGYKNFNKAARDLIGRLQKIDGDNYPETLCRMFIINAGQGFRLLWNTVKSFLDPKTTAKIHVLGNKYQSKLLEVIDASELPEFFGGTCNCXXGGCMRSDKGPWKDPEILKMVQCGMGRCGMNSGDPRDADEKLITEDEIVPVPKKQDSMRRNAVDSPKVAREKIEHPQMSPLHEMKDASDPDPX

SEQ ID NO: 22920 - protein, 254 aa, Zea mays
MANAGGGAAGEGEWLKVAQLRALVQAQDEDHRAKEVDNLTLRRFLRARGHNVDKAAAMLLKSLRWRAEAAPGGGTVREEQVRGELEQDKIYMGGVDRTGRPIIVGLLAKHYSANRDMAEFKSFVVYFFDKICARIPRGQEKFLAIMDLKGWGFANCDVRAYIAAIEIMQNYYPERLGKALMINVPYIFLKVWKTMIYPFIDANTRDKFVFVDDKSLRETLRREIDETQLPEFLGGKMPLVSLKDYAQQPQPVCE

SEQ ID NO: 22921 - protein, 186 aa, Zea mays
  unsure (1)..(186): unsure at all Xaa locations
MDRYVQYHVREFERAFAVKFPACSISAKKHVDQSTTILDVSGVGYKNFNKAARDLIGRLQKIDGDNYPETLCRMFIINAGQGFRLLWNTVKSFLDPKTTAKIHVLGNKYQSKLLEVIDASELPEFFGGTCNCXXGGCMRSDKGPWKDPEILKMVQCGMGRCGMNSGDPRDADEKLITEDEIVPVPK

SEQ ID NO: 22922 - protein, 336 aa, Zea mays
  unsure (1)..(336): unsure at all Xaa locations
MAATSEEAIKQFSALMEQLEEPLKSTFQNVHQGNLRGTLMRFLKAREWSVPKAYKMLMDCLNWRVQNEIDIVLAKPILPSDIYRVIRDTLLVGLTGYSKQGQPVYAFGVGLSTFDKASVNYYVQSHIQMNEYRDRVVLPAASKKFGRQINTCLKVMDMTGLKLSALSQIKMLTMITTVDDLNYPEKTETYYIVNAPYVFSACWKVVKPLLQERTKKKIQVLYGSGRDELLKVMDYESLPHFCKREGSGSSSDSLDGVXXCYSYDHPFHQQLYNYMKQQQSLNQAVGPRKQGSVHVDVPSPGLEEAKIAETIKAELQNLRGTGGLAHSFSSIQIEGP

SEQ ID NO: 22923 - protein, 336 aa, Zea mays
  unsure (1)..(336): unsure at all Xaa locations
MAATSEEAIKQFSALMEQLEEPLKSTFQNVHQGNLRGTLMRFLKAREWSVPKAYKMLMDCLNWRVQNEIDIVLAKPILPSDIYRVIRDTLLVGLTGYSKQGQPVYAFGVGLSTFDKASVNYYVQSHIQMNEYRDRVVLPAASKKFGRQINTCLKVMDMTGLKLSALSQIKMLTMITTVDDLNYPEKTETYYIVNAPYVFSACWKVVKPLLQERTKKKIQVLYGSGRDELLKVMDYESLPHFCKREGSGSSSDSLDGVXXCYSYDHPFHQQLYNYMKQQQSLNQAVGPRKQGSVHVDVPSPGLEEAKIAETIKAELQNLRGSGGLAHSFSSIQIEGP

SEQ ID NO: 22924 - protein, 336 aa, Zea mays; identical to SEQ ID NO: 22923
  unsure (1)..(336): unsure at all Xaa locations

SEQ ID NO: 22925 - protein, 336 aa, Zea mays; identical to SEQ ID NO: 22922
  unsure (1)..(336): unsure at all Xaa locations

SEQ ID NO: 22926 - protein, 257 aa, Zea mays
MANAGGGAAGEGEWLKVAQLRALVQAQDEDHRAKEVDNLTLRRFLRARGHNVDKAAAMLLKSLRWRAEAAPAGATVREEQVRGELEQDKIYMGGVDRTGRPHLVGLLAKHYSANRDMAEFKSFVVYFFDKICARIPRGQEKFLAIMDLKGWGYANCDVRAYIAAIEIMQNYYPERLGKALMINVPYIFLKVWKTMIYPFIDANTRDKFVFVDDKSLRETLRREIDESQLPEFLGGKMPLVSLKDYAQQPQPVSSESS

SEQ ID NO: 22927 - protein, 251 aa, Zea mays; identical to SEQ ID NO: 672

SEQ ID NO: 22928 - protein, 279 aa, Zea mays
  unsure (1)..(279): unsure at all Xaa locations
PHDPPPTHPPAAEVVGHGGAGAARAGGXRRRGXEWKQVAELRAVTQAQDPSCKDEDDYTLRRFLRARDHNIGKASAMLLKYLKWKPAAKPHGAIAAAEVAREAAQGKLYLQGHDREGRPLIYGFGARHHPARRDLDEFKRYVVHVLDATVARLPRRQEKFAAVADLAGWGYANCDIRGYLAALDIMQSYYPERLARVFLVHVPYVFMAAWKIVYPFIDDNTKKKFVFVPDKDLDRTLREAIDDSQLPEIYGGKLKLVTPAAKLPSHXLGGPVHDDCTSS

SEQ ID NO: 22929 - protein, 286 aa, Zea mays
  unsure (1)..(286): unsure at all Xaa locations
PGDRCTNSSPPSSYKSRVTTRPRQLADVVGHGGAGAAGGQRRRGXEWKHVAELRAVTQAQDPSCNDEDDYTLRRFLRARDHNISKAAXAMLLKYLKWKPVAKPHGAIAAAEVAREAAQGKLYLQGHDREGRPLIYGFGARHHPARRDMEEFKRYVVHVLDATVARLPRRQEKFAAVADLKGWGYANCDIRGYLAALDIMQSYYPERLGRVFLIHVPYVFMAAWKIVYPFIDDNTKKKFVFVADKDLDRTLREAIDDSQLAEIYGGKLKLVAPPANXTATTENGSIP

SEQ ID NO: 22930 - protein, 402 aa, Zea mays
LEAGRGSELGASSAPLFLPLSDFPSLLAPAPRQSFFPLDGAHKSAPNRQTKTRPRPPRQSSVLTFGPSSGYPAAAMAAEASAVQQLAGLLDQVDAPLKKTFENVHQGYPTETLLRFLKAREWHVNKAHRMLEDSLNWRMQNEIDSILEKPIIPVDLYRSIRDTQLIGLSGYSKEGIPVFAVGVGLSTYDKASVNYYVQSHIQINEYRDRFILPTVTKKYGRPITTCIKVLDMTGLKLSALHQMKIVTAISTVDDLNYPEKTETYYIVNAPYIFSACWKVVKPLLQERTRKKVHVLRGCGRDELLQIMDYSSLPHFCRQEGSGSSKHSSGDADNCFSLDHPFHQELYSFIQEQALNQELIKQGSLHVKIPEQDPEDAKIVEVIEAEFHKLGVQNGSANGIDQA

SEQ ID NO: 22931 - protein, 455 aa, Zea mays
  unsure (1)..(455): unsure at all Xaa locations
KPPLFSSPRRSSHHSRRRLVPFPAFPPHPAARPQAPRHRHVSDHHPAARARGSPDLQGRQAQPQSSLMDATALLRSSSFKEDSYVAAALPASELRALADLKXXLLATHPDPISIWGVPLIPVDERADVVLLKFLRARDFRVRDAHAMLLRCAAWRAEFGADAVLDEELGFKDLEGIVAYMHGWDRDGHPVCYNAYGVFKDRDMYERVFGDGDRLARFLRWRVQVMERGVRALTLRPGGVNAIIQVTDLKDMPKRELRAASNQILSLFQDNYPEMVARKVFINVPWYFSVLFSMISPFLTERTKSKFVIAREGNVAETLYKFIRPELVPVQYGGLSRTGDLENGPPKPASEFTIKGGEKVFLEIDGIEAGATITWDLVVGGWDLEYGAEYVPAAEDSYTLCVEKTRMVSATAEAVHNAFTAREAGKMVLSIDNSGSRKRKVAAYRYFVRKSSAXAC

SEQ ID NO: 22932 - protein, 484 aa, Zea mays
  unsure (1)..(484): unsure at all Xaa locations
WVPRGRPGFIFVWEGVLQILLPFENLLFSPLGIRTRPRRSSHHSRRRLVPFPASPPHPAARPQAPRHRHVSDHHPAARARGSPDLQGRQAQPQSSLMDATALLRSSSFKEDSYVAAALPASELRALADLKXXLLATHPDPISIWGVPLNPRSPPAAAVLLKFLRARDFRVRDAHAMLLRCAAWRAEFGADAVLDEELGFKDLEGIVAYMHGWDRDGHPVCYNAYGVFKDRDMYERVFGDGDRLAPCLRWRVQVMERGVRALTLRPGGVNAIIQVTDLKDMPKRELRAASNQILSLFQDNYPEMVARKVFINVPWYFSVLFSMISPFLTERTKSKFVIAREGNVAETLYKFIRPELVPVQYGGLSRTGDLENGPPKPASEFTIKGGEKVFLEIDGIEAGATITWDLVVGGWDLEYGAEYVPAAEDSYTLCVEKTRMVSATAEAVHNAFTAREAGKMVLSIDNSGSRKRKVAAYRYFVRKSSAXAC

SEQ ID NO: 22933 - protein, 327 aa, Zea mays
MGADSEDAVKQLSLLMEQVEAPLKRSFQNMHQGYPKETLVRFLKAREWNVAKAHKMIVECLNWRIQNEIDSVLERPIVPVDLYRSIRDSQLIGLSGYTKEGLPIFGIGVGHSTYDKASVHYYVQSHIQINEYRDRIILPRLTQQFGRPVTSCIKVLDMTGLKLSALSQIKMLTSISTVDDLNYPEKTETYYVVNVPYIFSACWKVVKPLLQERTKKKVKVLTGCGRDELLKIMDYSSLPHFCRREASGSSKHSSTDVDNCFSLDHPFHKELYGHIREQASRRELIKMGSLHVSIPEPDPDDAKIVEVIQAEFQKIGEQDESTNSHKD

SEQ ID NO: 22934 - protein, 286 aa, Schizosaccharomyces pombe
MSETISDPYPLTNPNAPLGHPGHLNSTQQATLDSMRLELQKLGYTERLDDATLLRFLRARKFNLQQSLEMFIKCEKWRKEFGVDDLIKNFHYDEKEAVSKYYPQFYHKTDIDGRPVYVEQLGNIDLKKLYQITTPERMMQNLVYEYEMLALKRFPACSRKAGGLIETSCTIMDLKGVGITSIHSVYSYIRQASSISQDYYPERMGKFYVINAPWGFSSAFNLIKGFLDEATVKKIHILGSNYKSALLEQIPADNLPAKLGGNCQCPGGCELSDAGPWHEEQWMNKN

SEQ ID NO: 22935 - protein, 497 aa, Yarrowia lipolytica
MTVTEQEFLASYPQKVAPGGPTGYPGNLTAEQEQKLGELKMILLTKGYEDRTDDATLLRFLRARKFDVPLAQEMWENCEKWRKEFGTNTILEDFWYKEKKEVAKLYPQYYHKTDKDGRPVYVENVGKVNIHEMYKITTQERMLRNLVWEYESFVRHRLPACSRVVGHLIETSCTILDLKGVSLSSASQVYGFLKDASNIGQNYYPERMGKFYLINAPFGFSTVFSVIKRFLDPVTVSKIHVYGSNYKEKLLAQVPAYNLPIKFGGQSSSKIGVELSDDGPWRDPQFVGPEAWPPWLVSDPPVPPPSSPTPPPTPSPLLPPRSVLTTRPLTQRPTVTELLLPLPELELLLLAVLLLLLELLLPSRLLLPRLLLPRRQGSRSRCCQDRHCPCPHRQDCCTSDQLFPPEMLAMMEQNEKKAEKAAEAKTKGGAAPQANAFTDEQLAQLNSLPQQVATGGVSQPLPDSHVTQGVPTVAKIAELPPVPMRMPIFPIKTKKHT

SEQ ID NO: 22936 - protein, 364 aa, Ajellomyces capsulatus
MTTPAVPSHPLTLDPKYDDYDFPTTAPDAQSGHPGHTTPEQDARVYQLRIMLEQLDYTERLDTLTLLRFLRARKFDVEAAKAMFVECEKWRQEFGTDDLVNTFEYPEKPQVFEYYPQYYHKTDKDGRPVYIEKLGKIDLNAMYKITTADRMLKNLVCEYEKLADPRLPACSRKAGKLLETCCSIMDLKGVGITRVPSVYGYVKQASAISQNYYPERLGKLYLINAPWGFSSVFSVVKGFLDPVTVQKIHVLGSGYEAELLAQVPKENLPKEFGGECECENGCEFSGMGPWQEKEWAKEPKWVTKAPDDTAKEEADKENKGKKGSEGQERQKEAAEAAETAVMQKETEKNEADTVKQKINGEVTA

SEQ ID NO: 22937 - protein, 334 aa, Neurospora crassa
MELEPKYDDYDYPTTAPDAQEGHPGHLTPQQQAQVTQLRLMLESEGYTKRLDTLTLLRFLRARKFDVNLAKQMFVECEKWRAETKLDETIPEWEYPEKEEVSKYYPQYYHKTDKDGRPVYIEQLGKIDLNAMYKITTAERMLTNLAVEYERLADPRLPACSRKAGVLLETCCTIMDLKGVGLTKAPQVFGYVKQASTLSQNYYPERLGKLYLINAPWGFSTVWNVIKAWLDPVTVSKIHVLGSGYSKELLGQVPPENLPKEFGGTCQCAGGCHMSDMGPWREEQWARPAKWEKKADAPAAAPAAAPAATEAAPAPAAEPAVAATEATAPAPAAA

SEQ ID NO: 22938 - protein, 400 aa, Neurospora crassa
MTADSIADASAASGTEVGYPNGHLGHLKPEEQEALESFKTNLAEKGYYKPGPPASHDDQTLLRYLRARRWNVVDAFKQFKETEDWRKANDLNVLYDTIDLEAYEASRRLYPQWTGRRDRRGIPLYLFEIRHLDSKTVSAYEKAAETNPSKAVTDGQTSPKLLRLFALYENLTRFAQPLCTELPDRPHATTTPITLSTNIVDVSGVSLRQFWNLKSHMQAASQLATAHYPETLDRIFIIGAPYFFSTVWGWIKRWFDPITVSKIFILGPSEVKATLEEFIDPKNIPKQYGGELDFTWGDQPKTDPYIKETVKWENGLKDFPEGPKYWRPTADGTRMECVAVGSEGGKQRMLSVGTLERVCNVKKVDGDALAEGVKGLSVGDAEKNEIVETGKEATVPTVSA

SEQ ID NO: 22939 - protein, 301 aa, Candida albicans
MTTMTTEEILASYPQITAPTDQTGYTSNLTPEQKTTLDIFRQQLTELGYKDRLDDASLLRFLRARKFDIQKAIDMFVACEKWREDFGVNTILKDFHYEEKPIVAKMYPTYYHKTDKDGRPVYFEELGKVDLVKMLKITTQERMLKNLVWEYEAMCQYRLPACSRKAGYLVETSCTVLDLSGISVTSAYNVIGYVREASKIGQDYYPERMGKFYLINAPFGFSTAFKLFKPFLDPVTVSKIHILGYSYKKELLKQIPPQNLPVKFGGMSDVSDDDLLLKDVGPWRDPEFIGPEGECPRAYNI

SEQ ID NO: 22940 - protein, 301 aa, Candida albicans
MTTMTTEEILASYPQITAPTDQTGYTSNLTPEQKTTLDIFRQQLTELGYKDRLDDASLLRFLRARKFDIQKAIDMFVACEKWREDFGVNTILKDFHYEEKPIVAKMYPTYYHKTDKDGRPVYFEELGKVDLVKMLKITTQERMLKNLVWEYEAMCQYRLPACSRKAGYLVETSCTVLDLLGISVTSAYNVIGYVREASKIGQDYYPERMGKFYLINAPFGFSTAFKLFKPFLDPVTVSKIHILGYSYKKELLKQIPPQNLPVKFGGMSDVSDDDLLLKDVGPWRDPEFIGPEGECPRAYNI

SEQ ID NO: 22941 - protein, 302 aa, Candida glabrata
MVSEAEFLASYPQKCPAGSLPGTPGNTDEAQEGALKQLRSELEAAGFKERLDDSTLLRFLRARKFDVALAKEMFENCEKWRKEYGTNTIMQDFHYDEKPLVAKYYPQYYHKTDKDGRPVYFEELGAVNLTEMEKITTQERMLKNLVWEYESVVNYRLPACSRAAGYLVETSCTVMDLKGISISSAYSVLSYVREASYISQNYYPERMGKFYLINAPFGFSTAFRLFKPFLDPVTVSKIFILGSSYQSELLKQIPAENLPSKFGGKSEVDEAAGGLYLSDIGPWRDAKYIGPEGEAPEMFSMK

SEQ ID NO: 22942 - protein, 743 aa, Caenorhabditis elegans
MVQTYRSPVRIYKHPFEIVMAAYEMRFPTCPQIPIFVGSEVTYEYKSVDGAEWVIDRKCQLNVEAPYLVKKIAGVDYVYFSQKNSLDRRKRTLDIEATNISFSSRINVKENCTYYVHAENENWTCFEQSASLDVKNFFGLESAVEKLAVRQYGANLAKGKEILEFFIEELLKKTTHIERFRDADQEETTSATDSAIEMKELSDGDAVLVNDRPPMLAAETDEMRTARATASFDDACRVCMIIYCRIFIIISSYFFNFPADSKLEAEYIRRFLGQLSPLEESRLCEIKYSLQAHHKGKLPNDAHLLRFLRARDFDVAKAKDMVHASIIWRKQHNVDKILEEWTRPTVIKQYFPGCWHNSDKAGRPMYILRFGQLDTKGMLRSCGVENLVKLTLSICEDGLQRAAEATRKLGTPISSWSLVVDLDGLSMRHLWRPGVQCLLKIIEIVEANYPETMGQVLVVRAPRVFPVLWTLISPFIDEKTRKKFMVSGGSGGDLKEELRKHIEEKFIPDFLGGSCLTTNCGLGGHVPKSMYLPVEEQEGASSSEDPLHSTYTSTATWRGYPVEVVIPIETAGCVLTWDFDVLKNDCEFSLYFSTEKIEQPAVRDGAQSPTTILNPVEMVSAAIGGASHQHPDLQCAPELKIGTPQLRLEEKAVVFQEGDSMQGSHYCSRAGTYIMQWRVPETAAGHSSTFDFGSHKCRLIYYYEILNSENFRGSVASLESCRSSSFSSIAPPTPPTPGTPRNP

SEQ ID NO: 22943 - protein, 470 aa, Caenorhabditis elegans
MYVHNKKEQNRLNLKLNYFVFQGKLPNDAHLLRFLRARDFDVAKAKDMVHASIIWRKQHNVDKILEEWTRPTVIKQYFPGCWHNSDKAGRPMYILRFGQLDTKGMLRSCGVENLVKLTLSICEDGLQRAAEATRKLGTPISSWSLVVDLDGLSMRHLWRPGVQCLLKIIEIVEANYPETMGQVLVVRAPRVFPVLWTLISPFIDEKTRKKFMVSGGSGGDLKEELRKHIEEKFIPDFLGGSCLTTNCGLGGHVPKSMYLPVEEQEGASSSEDPLHSTYTSTATWRGYPVEVVIPIETAGCVLTWDFDVLKNDCEFSLYFSTEKIEQPAVRDGAQSPTTILNPVEMVSAAIGGASHQHPDLQCAPELKIGTPQLRLEEKAVVFQEGDSMQGSHYCSRAGTYIMQWRVPETAAGHSSTFDFGSHKCRLIYYYEILNSENFRGSVASLESCRSSSFSSIAPPTPPTPGTPRNP

SEQ ID NO: 22944 - protein, 394 aa, Caenorhabditis elegans
MIDDMITAKKFSADILEKAEKLKVSIPSVPDKIDSPFFFARFLNANNGDVEKTRQKIIQLFEHRKLMGYEKINDLDIFTTVNIGKDCFERFHISQLNYEVTSKNLHVFVQKMEGTDIKEILKVMPLSYVLHSYFMLQENFSRAMAHTERKTGKTSSVVCILDLKGLNLMDFMNPLSGPAQLARLVVQVWAEYFSEHLCKLLLINPPGIISVMWQVTKRLVDPNTVEKLAFLSNVEDLKKYLEPEAIPVEYGGTYRDDTGYADPPEGACKQPKRITKEDYKPQEYIWVKNGILKAPKGKSYSIKAFQTSEYIIKTTTEGKLVWNYTTSGDVDFEIVKRDAGKEMAIWPKITVTSLKLPEFGEKLVAPGEYILRFKNPSSTWFPVKVNCAAEILNV

SEQ ID NO: 22945 - protein, 368 aa, Caenorhabditis elegans
MIDDMITAKKFSADILEKAEKLKVSIPSVPDKIDSPFFFARFLNANNGDVEKTRQKIIQLFEHRKLMGYEKINDLDIFTTVNIGKDCFERFHISQLNYEVTSKNLHVFVQKMEGTDIKEILKVMPLSYVLHSYFMLQENFSRAMAHTERKTGKTSSVVCILDLKGLNLMDFMNPLSGPAQLARLVVQVWAEYFSEHLCKLLLINPPGIISVMWQVTKRLVDPNTVEKLAFLSNVEDLKKYLEPEAIPVEYGGTYRDDTGYADPPEGACKQPKRITKEDYKPQEYIWVKNGILKAPKGKSYSIKAFQTSEYIIKTTTEGKLVWNYTTSGDVDFEIVKRDAGKEMAIWPKITVTSLKSLARNLLHRESIF

SEQ ID NO: 22946 - protein, 343 aa, Todarodes pacificus
MSLREQMGADTLIAEYTPPDVIQKFMTGGDVGHDKDGSVLRIEPWGYLDMKGIMYSCKKSDLEKSKLLQCEKHLKDLEAQSEKVGKPCTGLTVVFDMENVGSKHMWKPGLDMYLYLVQVLEDNYPEMMKRLFVINAPTLFPVLYKLVKPLLSEDMKNKIFVLGGDYKDTLLEYIDAEELPAYLGGTKSEGDEKCSELICHGGEVPKEFYLENTDDFETMETITVGSGDKIYVEYEIENENTYIKWEYKTEEHDIGFGLFRKNGDEWEEVVPIERTDCSIMTLDGSHKCKDPGTYALCFDNSFSMMTSKNVRYTAEVMDPEVDSEDINKMIKDSTWDELSAQIS

SEQ ID NO: 22947 - protein, 659 aa, Drosophila melanogaster
MVQKFQSPVRVYKYPFELVMKAYERRFPTCPQMPIVLDCEVIKDESLEDGAKRNTSRRCKLAVDAPYIFKKLIGVDHVYFLQHNFLDLANRTLSIEAVNESFSSRIEIFERCRYYAHPDNSEWTCFDQSATLDIKNFFGFEHSMEKMGMKQYTQTTLKGKEIIEFFIGQLREEGITHVERWTSPSDATKSPTLDQASDQQHSILLDGDFIARSLGQLSPMQESKLLELRKMLDGVDDLERVPSYQTILRFLAARDWHVSQAYAMLCDSLRWRREHRIDALLAEYSKPAVVVEHFPGGWHHLDKDGRPVYILRLGHMDVKGLLKSLGMDGLLRLALHICEEGIQKINESAERLEKPVLNWSLLVDLEGLSMRHLWRPGIKALLNIIETVERNYPETMGRVLVVRAPRVFPIAWTIVSAFIDEHTRSKFLFYGPDCAHMKDGLAQYLDEEIVPDFLGGPCKTMIHEGGLVPKTLYKMNSLEDHDDEVTAELPTTAAAQALVPGKRLSANQQHDHRNLYKSVDLKAGFAHELLIRNEDPKSVLTWDFDVMRNDLHFTLYRVTQELPEKNDSAVSYFDLQDFVEGVNYFREEPTLICRHKESVQGSHVMHHNDSYLMHWFSPSGAQLNVFYEVLSSANYKGSMTSLQSAFSSNSSAASSVQSR

SEQ ID NO: 22948 - protein, 659 aa, Drosophila melanogaster
MVQKFQSPVRVYKYPFELVMKAYERRFPTCPQMPIVLDCEVIKDESLEDGAKRNTSRRCKLAVDAPYIFKKLIGVDHVYFLQHNFLDLANRTLSIEAVNESFSSRIEIFERCRYYAHPDNSEWTCFDQSATLDIKNFFGFEHSMEKMGMKQYTQTTLKGKEIIEFFIGQLREEGITHVERWTSPSDATKSPTLDQASDQQHSILLDGDFIARSLGQLSPMQESKLLELRKMLDGVDDLERVPSYRTILRFLAARDWHVSQAYAMLCDSLRWRREHRIDALLAEYSKPAVVVEHFPGGWHHLDKDGRPVYILRLGHMDVKGLLKSLGMDGLLRLALHICEEGIQKINESAERLEKPVLNWSLLVDLEGLSMRHLWRPGIKALLNIIETVERNYPETMGRVLVVRAPRVFPIAWTIVSAFIDEHTRSKFLFYGPDCAHMKDGLAQYLDEEIVPDFLGGPCKTMIHEGGLVPKTLYKMNSLEDHDDEVTAELPTTAAAQALVPGKRLSANQQHDHRNLYKSVDLKAGFAHELLIRNEDPKSVLTWDFDVMRNDLHFTLYRVTQELPEKNDSAVSYFDLQDFVEGVNYFREEPTLICRHKESVQGSHVMHHNDSYLMHWFSPSGAQLNVFYEVLSSANYKGSMTSLQSAFSSNSSAASSVQSR

SEQ ID NO: 22949 - protein, 697 aa, Danio rerio
MVQKYQSPVRVYKYPFELIMAAYDRRFPTCPLIPMFVKSDIINESHSEDGAELFIERRCTVDVEAPRLLKRIAGVDYMYFIQKNSLNRRERTLHIEAYNESFSSRVNVYEHCCYTVHPESEDWTCFEQSASMDIKSFFGFESTAEKIAMKQYATSIKKGKEIIEFHLKQLEEEGITHMPRWVPPTAPQLIPVSSAKPIPACTSRAHLGSTDVVPGSPDDKLDADYISRYLGTLTPFQESCLIRLRQWLQETHKGKIPKDQHVLRFLRSRDFNLEKAKEALCQTLTWRKQHQIDFLLDTWQSPQPLQDYYTGGWHHHDKDGRPLYILRLGQMDTKGLVRALGEETLLRHVLSINEEGLRRCEENTKIFGKPISCWTCLVDLEGLNMRHLWRPGIKALLRMIEVVGANYPETLGRLLILRAPRVFPVLWTLVSPFIDENTRKKFLIYAGNDYQGPGGLVDYINKDCIPDFLGGDSMCDIPEGGLVPKSLYRTAEELENEEVKLWNETIYKSASVLKGAPHEVLIEITDVSSVITWDFDVCKGDMIFNIYHSRRAPQPVKKEGLSAHNLACPAGNNVQFIDRSWMLGQDYSMVETALTCREGESVQGSHVTRWPGFYILQWRLYSTPSCSSSSRPRVDDVLASLQVSSHRCKVMYFTEVLQSADFRGSMSSLESSHSGFSLLSASTTSSNHSHTASTISR

SEQ ID NO: 22950 - protein, 406 aa, Homo sapiens
MSSRVGDLSPQQQEALARFRENLQDLLPILPNADDYFLLRWLRARNFDLQKSEDMLRRHMEFRKQQDLDNIVTWQPPEVIQLYDSGGLCGYDYEGCPVYFNIIGSLDPKGLLLSASKQDMIRKRIKVCELLLHECELQTQKLGRKIEMALMVFDMEGLSLKHLWKPAVEVYQQFFSILEANYPETLKNLIVIRAPKLFPVAFNLVKSFMSEETRRKIVILGDNWKQELTKFISPDQLPVEFGGTMTDPDGNPKCLTKINYGGEVPKSYYLCEQVRLQYEHTRSVGRGSSLQVENEILFPGCVLRWQFASDGGDIGFGVFLKTKMGEQQSAREMTEVLPSQRYNAHMVPEDGSLTCLQAGVYVLRFDNTYSRMHAKKLSYTVEVLLPDKASEETLQSLKAMRPSPTQ

SEQ ID NO: 22951 - protein, 696 aa, Homo sapiens
MVQRYQSPVRVYKYPFELVMAAYEKRFPTCPQIPVFLGSEVLRESRSPDGAVHVVERSCRLRVDAPRLLRKIAGVEHVVFVQTNILNWKERTLLIEAHNETFANRVVVNEHCSYTVHPENEDWTCFEQSASLDIRSFFGFENALEKIAMKQYTANVKRGKEVIEHYLNELISQGTSHIPRWTPAPVREEDARNQAGPRDPSSLEAHGPRSTLGPALEAVSMDGDKLDADYIERCLGHLTPMQESCLIQLRHWLQETHKGKIPKDEHILRFLRAHDFHLDKAREMLRQSLSWRKQHQVDLLLQTWQPPALLEEFYAGGWHYQDIDGRPLYILRLGQMDTKGLMKAVGEEALLRHVLSVNEEGQKRCEGSTRQLGRPISSWTCLLDLEGLNMRHLWRPGVKALLRMIEVVEDNYPETLGRLLIVRAPRVFPVLWTLISPFINENTRRKFLIYSGSNYQGPGGLVDYLDREVIPDFLGGESVCNVPEGGLVPKSLYMTEEEQEHTDQLWQWSETYHSASVLRGAPHEVAVEILEGESVITWDFDILRGDVVFSLYHTKQAPRLGAREPGTRASGQLIDKGWVLGRDYSRVEAPLVCREGESIQGSHVTRWPGVYLLQWQMHSPPSSVACSLPGVDDVLTALHSPGPKCKLLYYCEVLASEDFRGSMSSLESCTSGFSQLSAATSSSSSGQSHSSSLVSR

SEQ ID NO: 22952 - protein, 756 aa, Homo sapiens
GSWSSLGPAGFAPAPPAFHSCPGRRVFKAGHTRLEIRDRAPPQALCTPLPGDLHWCSSVNMVQRYQSPVRVYKYPFELVMAAYEKRFPTCPQIPVFLGSEVLRESRSPDGAVHVVERSCRLRVDAPRLLRKIAGVEHVVFVQTNILNWKERTLLIEAHNETFANRVVVNEHCSYTVHPENEDWTCFEQSASLDIRSFFGFENALEKIAMKQYTANVKRGKEVIEHYLNELISQGTSHIPRWTPAPVREEDARNQAGPRDPSSLEAHGPRSTLGPALEAVSMDGDKLDADYIERCLGHLTPMQESCLIQLRHWLQETHKGKIPKDEHILRFLRAHDFHLDKAREMLRQSLSWRKQHQVDLLLQTWQPPALLEEFYAGGWHYQDIDGRPLYILRLGQMDTKGLMKAVGEEALLRHVLSVNEEGQKRCEGSTRQLGRPISSWTCLLDLEGLNMRHLWRPGVKALLRMIEVVEDNYPETLGRLLIVRAPRVFPVLWTLISPFINENTRRKFLIYSGSNYQGPGGLVDYLDREVIPDFLGGESVCNVPEGGLVPKSLYMTEEEQEHTDQLWQWSETYHSASVLRGAPHEVAVEILEGESVITWDFDILRGDVVFSLYHTKQAPRLGAREPGTRASGQLIDKGWVLGRDYSRVEAPLVCREGESIQGSHVTRWPGVYLLQWQMHSPPSSVACSLPGVDDVLTALHSPGPKCKLLYYCEVLASEDFRGSMSSLESCTSGFSQLSAATSSSSSGQSHSSSLVSR

SEQ ID NO: 22953 - protein, 403 aa, Homo sapiens
MSGRVGDLSPRQKEALAKFRENVQDVLPALPNPDDHFLLRWLRARSFDLQKSEAMLRKHVEFRKQKDIDNIISWQPPEVIQQYLSGGMCGYDLDGCPVWYDIIGPLDAKGLLFSASKQDLLRTKMRECELLLQECAHQTTKLGRKVETITIIYDCEGLGLKHLWKPAVEAYGEFLCMFEENYPETLKRLFVVKAPKLFPVAYNLIKPFLSEDTRKKIMVLGANWKEVLLKHISPDQVPVEYGGTMTDPDGNPKCKSKINYGGDIPRKYYVRDQVKQQYEHSVQISRGSSHQVEYEILFPGCVLRWQFMSDGADVGFGIFLKTKMGERQRAGEMTEVLPNQRYNSHLVPEDGTLTCSDPGIYVLRFDNTYSFIHAKKVNFTVEVLLPDKASEEKMKQLGAGTPK

SEQ ID NO: 22954 - protein, 403 aa, Homo sapiens
MSGRVGDLSPRQKEALAKFRENVQDVLPALPNPDDYFLLRWLRARSFDLQKSEAMLRKHVEFRKQKDIDNIISWQPPEVIQQYLSGGMCGYDLDGCPVWYDIIGPLDAKGLLFSASKQDLLRTKMRECELLLQECAHQTTKLGRKVETITIIYDCEGLGLKHLWKPAVEAYGEFLCMFEENYPETLKRLFVVKAPKLFPVAYNLIKPFLSEDTRKKIMVLGANWKEVLLKHISPDQVPVEYGGTMTDPDGNPKCKSKINYGGDIPRKYYVRDQVKQQYEHSVQISRGSSHQVEYEILFPGCVLRWQFMSDGADVGFGIFLKTKMGERQRAGEMTEVLPNQRYNSHLVPEDGTLTCSDPGIYVLRFDNTYSFIHAKKVNFTVEVLLPDKASEEKMKQLGAGTPK

SEQ ID NO: 22955 - protein, 715 aa, Homo sapiens
MVQKYQSPVRVYKYPFELIMAAYERRFPTCPLIPMFVGSDTVSEFKSEDGAIHVIERRCKLDVDAPRLLKKIAGVDYVYFVQKNSLNSRERTLHIEAYNETFSNRVIINEHCCYTVHPENEDWTCFEQSASLDIKSFFGFESTVEKIAMKQYTSNIKKGKEIIEYYLRQLEEEGITFVPRWSPPSITPSSETSSSSSKKQAASMAVVIPEAALKEGLSGDALSSPSAPEPVVGTPDDKLDADHIKRYLGDLTPLQESCLIRLRQWLQETHKGKIPKDEHILRFLRARDFNIDKAREIMCQSLTWRKQHQVDYILETWTPPQVLQDYYAGGWHHHDKDGRPLYVLRLGQMDTKGLVRALGEEALLRYVLSVNEERLRRCEENTKVFGRPISSWTCLVDLEGLNMRHLWRPGVKALLRIIEVVEANYPETLGRLLILRAPRVFPVLWTLVSPFIDDNTRRKFLIYAGNDYQGPGGLLDYIDKEIIPDFLSGECMCEVPEGGLVPKSLYRTAEELENEDLKLWTETIYQSASVFKGAPHEILIQIVDASSVITWDFDVCKGDIVFNIYHSKRSPQPPKKDSLGAHSITSPGGNNVQLIDKVWQLGRDYSMVESPLICKEGESVQGSHVTRWPGFYILQWKFHSMPACAASSLPRVDDVLASLQVSSHKCKVMYYTEVIGSEDFRGSMTSLESSHSGFSQLSAATTSSSQSHSSSMISR

SEQ ID NO: 22956 - protein, 400 aa, Homo sapiens
MSGRVGDLSPKQAETLAKFRENVQDVLPALPNPDDYFLLRWLRARNFDLQKSEALLRKYMEFRKTMDIDHILDWQPPEVIQKYMPGGLCGYDRDGCPVWYDIIGPLDPKGLLFSVTKQDLLKTKMRDCERILHECDLQTERLGKKIETIVMIFDCEGLGLKHFWKPLVEVYQEFFGLLEENYPETLKFMLIVKATKLFPVGYNLMKPFLSEDTRRKIIVLGNNWKEGLLKLISPEELPAQFGGTLTDPDGNPKCLTKINYGGEIPKSMYVRDQVKTQYEHSVQINRGSSHQVEYEILFPGCVLRWQFSSDGADIGFGVFLKTKMGERQRAGEMTDVLPSQRYNAHMVPEDGNLTCSEAGVYVLRFDNTYSFVHAKKVSFTVEVLLPDEGMQKYDKELTPV

SEQ ID NO: 22957 - protein, 387 aa, Bos taurus
MSGRVGDLSPKQKEALAKFRENVQDVLPALPNPDDYFLLRWLRARNFNLQKSEAMLRKHVEFRKQKDIDNIMSWQPPEVVQQYLSGGMCGYDLEGSPIWYDIIGPLDAKGLLLSASKQDLFKTKMRDCELLLQECVRQTEKMGKKIEATTLIYDCEGLGLKHLWKPAVEAYGEFLCMFEENYPETLKRLFIVKAPKLFPVAYNLVKPFLSEDTRKKIQVLGANWKEVLLKYISPDQLPVEYGGTMTDPDGNPKCKSKINYGGDIPKKYYVRDQVKQQYEHSVQISRGSSHQVEYEILFPGCVLRWQFMSDGSDIGFGIFLKTKVGERQRAGEMREVLPSQRYSAHLVPEDGSLTCSDPGIYVLRFDNTYSFIHAKKVSFTVDVLLPD

SEQ ID NO: 22958 - protein, 403 aa, Bos taurus
MSGRVGDLSPKQKEALAKFRENVQDVLPALPNPDDYFLLRWLRARNFNLQKSEAMLRKHVEFRKQKDIDNIMSWQPPEVVQQYLSGGMCGYDLEGSPIWYDIIGPLDAKGLLLSASKQDLFKTKMRDCELLLQECVRQTEKMGKKIEATTLIYDCEGLGLKHLWKPAVEAYGEFLCMFEENYPETLKRLFIVKAPKLFPVAYNLVKPFLSEDTRKKIQVLGANWKEVLLKYISPDQLPVEYGGTMTDPDGNPKCKSKINYGGDIPKKYYVRDQVKQQYEHSVQISRGSSHQVEYEILFPGCVLRWQFMSDGSDIGFGIFLKTKVGERQRAGEMREVLPSQRYNAHLVPEDGSLTCSDPGIYVLRFDNTYSFIHAKKVSFTVEVLLPDKALEEKMQQLGAVTPK

SEQ ID NO: 22959 - protein, 385 aa, Anopheles gambiae str. PEST
DILKPEHDDYYLVRWLRARNWNPEAAEKMLRDSMKFRERWNTDEIAKWPTPQILLDYSPHGVSGYDKEGSPIIIIPFAGFDIWGLLHSVSRADIVRMTMQALEGYMQQAYEQSKKTGNPNSRQFIVVFDMDNFNLKQYIWRPASEVVISLIKMYEANYPEILKCCYIINTPKVFAFAYNMVKKFLGEYTIDKIRIYKPDRTKWLPAILERCDADQLPAYFGGTQTDPDGNPKCETKICWGGKVPKELYTSKEDSFNNNLTFTETEIRKGGRLKLTFDCEDAGCFLKWEFRTFDHDIKFGVKCVNKKTEESVIEVPLKRVSSHQVDESGFITCQPGCTYHVLFDNSYSYFKTKKIRYSVLMTAPLNDEEQTMAPIAVTEEETSPAD

SEQ ID NO: 22960 - protein, 325 aa, Arabidopsis thaliana
MSITNEEAVKQLRALMEDVDDSLRESYRNIHQGYPTENLLRFLKARDGNVQKAHKMLLECLEWRTQNEIDKILTKPIVPVDLYRGIRDTQLVGVSGYSKEGLPVIAIGVGLSTYDKASVHYYVQSHIQMNEYRDRVVLPSASKKQGRPICTCLKILDMSGLKLSALSQIKLMTAITTIDDLNYPEKTETYYVVNVPYIFSACWKTIKPLLQERTKKKIQVLKGCGKDELLKIMDYESLPHFCRREGSGSGRHISNGTVDNCFSLDHSFHQDLYDYVKQQALVKGSGAPIRHGSVHVKFPEPDTEGNKIFDTLENEFQKLGNDQKI

SEQ ID NO: 22961 - protein, 344 aa, Arabidopsis thaliana
MSITNEEAVKQLRALMEDVDDSLRESYRKSPFCDVDGGFTNACVMLQNIHQGYPTENLLRFLKARDGNVQKAHKMLLECLEWRTQNEIDKILTKPIVPVDLYRGIRDTQLVGVSGYSKEGLPVIAIGVGLSTYDKASVHYYVQSHIQMNEYRDRVVLPSASKKQGRPICTCLKILDMSGLKLSALSQIKLMTAITTIDDLNYPEKTETYYVVNVPYIFSACWKTIKPLLQERTKKKIQVLKGCGKDELLKIMDYESLPHFCRREGSGSGRHISNGTVDNCFSLDHSFHQDLYDYVKQQALVKGSGAPIRHGSVHVKFPEPDTEGNKIFDTLENEFQKLGNDQKI

SEQ ID NO: 22962 - protein, 227 aa, Arabidopsis thaliana
MGIVSEEAIDEFQELMDQVEEPLKKTYERVHQGYLRENLGPFLKARNWNVCKAHTMLVECLRWRVDNEIDGGLSKPIVPTELYRDVRDSQLIGMSGYTKEGLPVFAIGVGLSTFDKASVHYYVQSHIQINEYRDRVLLPSISKKNGRPITTCVKVLDMTGLKLSALSQIKLVTIISTIDDLNYPEKTQPYYVVNAPYIFSACWKGCKTSFTREDKGKSSCLIRLRKG

SEQ ID NO: 22963 - protein, 324 aa, Glycine max
MGVGSQDAIKQFQAFIDQVEEPLRTTFQNVHQGFVTETLMRFLKARDWDPCKAHKMLVDCLNWRVQNEIDNILSKPIVPADLYRAVRDSQLIGLSGYSREGLPVFAIGVGLSTFDKASVHYYVQSHIQINEYRERIILPSASKKQGRPITTCIKVLDMTGLKLSALNQIKLLTIISSIDDLNYPEKTNTYYIVNAPYIFSACWKVVKPLLQERTRRKIQVLPGCGRDELLTIMDYSSLPHFCRREGSGSSRHSESGSENCYSLDHPFHQELYNHIKQQARLREAVEPIKQGSFHVDFPVPPDDEVEIAKTIESELHKFENGNGV

SEQ ID NO: 22964 - protein, 324 aa, Glycine max; identical to SEQ ID NO: 22963

SEQ ID NO: 22965 - protein, 329 aa, Glycine max
MGLVSQDALNQLQALMDQVLLEEEPLQRTFQNVHQGCVTETLTRFLKAREWNATKAHKMIVDCLKWRVQNEIDNILSKPIIPTDLYRGIRDSQLIGLSGYSREGLPVFAIGVGLSTFDKASVHYYVQSHIQINEYRDRVILPSASKKHERPITTCVKVLDMTGLKLSALNQIKLLTIISSIDDLNYPEKTNTYYIVNAPYIFSACWKVVKPLLQERTRRKVQVLQGCGRDELLKIMDYTSLPHFCRREGSGSSRHSENGNENCYSVDHPFHKQLYNYIKEQSRIHEAVEPIKQGSFHVDFPEPPAEKAEIVKTLESELHKFKISNENGD

SEQ ID NO: 22966 - protein, 326 aa, Glycine max
  unsure (1)..(326): unsure at all Xaa locations
MGVGSQDAIKQLLPVLGVLQNPTSISYENVHQGFVTETLMRFLKARDWDPCKAHKMLVDCLNWRVQNEIDNILSKPIVPADLYRAVRDSQLIGLSGYSREGLPVFAIGVGLSTFDKASVHYYVQSHIQINEYRERIILPSASKKQGRPITTCIKVLDMTGLKLSALNQIKLLTIISSIDDLNYPEKTNTYYIVNXPYIFXACWKVVKPLLQERTRRKVQVLQGCGRDELLKIMDYTSLPHFCRREGSGSSRHSGNGNENCYSLDHPFHQQLYNYIKEKSRIHEAVEPIKQGSFHVDFPEPPAEKAEIVKTLESELHKFKISNVNGD

SEQ ID NO: 22967 - protein, 337 aa, Glycine max
MGGGNQEAVKQLQTLMENVDDEQLKNTFQIMHQGYQTETLIRFLKARDWNIAKAHKMLIDCLNWRVENEIDNVLRKPIPMDLYRAIRDSQLIGMSGYSKEGLPVIAVGVGLSTYDKASDKYYIQSHIQLNEYRDQVILPTATRKHGRYIGTCVKVLDMTGLKFSALNQLRLLTAISTIDDLNYPEKTDTYYIVNVPYVFSACWKVVKPLLQERTRRKIQVLQGCGKEELLKVMDYASLPHFCRKEDSKSSKHHALGNRNCFSFNHAFHQQLYNHIKQQSIIVESISPIRQGSFYVDIPEPDPDDAKIAKTIETEFHKLENQKNGFTNSLNGLRVNGH

SEQ ID NO: 22968 - protein, 331 aa, Glycine max
MGGGNQEAVKQLQTLMENVDDEQLKNTFQIMHQGYQTETLIRFLKARDWSVAKAHKMLIDCLNWRVENEIDNVLRKPIPTDLYKAIRDSQLIGMSGYSKEDLPVIAVGVGLSTYDKASDKYYIQSHIQLNEYRDRVILPTATRKHGRYIGTCVKVLDMSGLKFSALNQLRLLTAISTIDDLNYPEKTDTYYIVNAPYVFSACWRVVKPLLQERTRRKIQVLQGCGKEELLRVMDYASLPHFCRKEDSKSSKHHALGNRNGFSFNHAFHHQLYNVIKHQSIIVESISPIRQGSFYVHIPEPGPGDAEIAWSIESEFRKLESGEWLSQPIKGC

SEQ ID NO: 22969 - protein, 316 aa, Glycine max
  unsure (1)..(316): unsure at all Xaa locations
TSDLGIGSLDALSLLKTMXESEPIXKAYHNEHQGFVTXTLMRXVKKADWDSXKAHRMLVDNLIGKLKDRVDNIITEHILPVDLFRAXXSREGIHVFVSVVGISSSYKASVXHYYVQSHIQINEYRERIILPSASKKQGRPITTCIKVLDMTGLKLSALNQIKLLTIISSIDDLNYPEKTNTYYIVNAPYIFSACWKVVKPLLQERTRRKIQVLPGCGRDELLTIMDYSSLPHFCRREGSGSSRHSESGSENCYSLDHPFHQGLYNHIKQQARLREAVEPIKQGSFHVDFPVPPDDEVEIAKTIESELHKFENGNDV

SEQ ID NO: 22970 - protein, 240 aa, Glycine max
  unsure (1)..(240): unsure at all Xaa locations
XIRHQIGLSGYSREGLPVFAIGVGLSTFDKASVHYYVQSHIQINEYRDRVILPSASKKHERPITTCVKILDMTGLKLSALNQIKLLTIISSIDDLNYPEKTNTYYIVNAPYIFSACWKVVKPLLQERTRRKVQVLQGCGRDELLKIMDYASLPHFCRREGSGSSRHSGNGNENCYSLDHPFHQQLYNYIKEKSRIHEAVEPIKQGSFHVDFPEPPAEKAEIVKTLESELHKFKISNVNGD

SEQ ID NO: 22971 - protein, 229 aa, Glycine max
  unsure (1)..(229): unsure at all Xaa locations
MCIINQEAIKQLQSLMENLDEQQKNTFQIMHRGYPTETLVRFLKARDGNVVKAHKMLIDCLQWRVENEIDNVLSKPIPPDLYRRLRDSQLVGMSGFSKEGLPVIAGGVGLSTFDEVFDKYYVQSHIQMNEYRDRVMLPTATKNHGRHIDTCVKVLDMTGLKLSALSQLKLWTAISTIDDLNYPXKTDAYYIVNGPYVFSACWKVVKPLLQXRTRRKVXVLKGXGMEELL

SEQ ID NO: 22972 - protein, 165 aa, Glycine max
  unsure (1)..(165): unsure at all Xaa locations
MGVGSQDAIKQFQAFIDQVEEPLRTTFQNVHQGFVTATLMRFLKARDWDPYKAQKMLVDCLNWRVQNEIDNILSKPIVPADLYRAVRDSQLIGLSGYSREGLPVFAIGVGLNTFDKASVHYYVQSHIQINEYXRERIGLPSASEKQGRPITTCIKVLHMTGLKLX

SEQ ID NO: 22973 - protein, 123 aa, Glycine max
  unsure (1)..(123): unsure at all Xaa locations
MGVGSQDAIKQFQAFIDQVEEPLRTTFQNVHQGFVTATLMRFLKARDWDPYKAQKMLVDCLNWRVQNEIDNILSKPIVPADLYRAVRDSQLIGLSGYSREVLPVFXIGVGLNTFDKTSAHYYL

SEQ ID NO: 22974 - protein, 128 aa, Glycine max
PTSITLLFQKGSRKHGRYIGTCVKVLDMSGLKFSALNLLQLLTAISTIDDLNYPEKTDTYYIVNAPYVFSACWKVVKPLLQERTRRKIQVLQGWGKEELLRVNNLLSLVNIIFNNLLLAITISPMPYV

SEQ ID NO: 22975 - protein, 97 aa, Glycine max
  unsure (1)..(97): unsure at all Xaa locations
MGLVSQDALNQLQALMDQVLLEEEPLQRTFQNVHLGCVAETLTRFLIAREWNATKAHQMIVDCLKWRVQNEIDNILSKPIIPTDLYRGIRDSQLIGX

SEQ ID NO: 22976 - protein, 115 aa, Glycine max
RTRPNLLWVMDYASLPHFCRKEDSKSSKHHASGNSGNCFSFNHAFHQQLYNHIKQQAIIVESISPIRQGSFCVDIPEPDPDDAKIAKTIENEFHKLENQKNGFTNSLTGLTVNGH

SEQ ID NO: 22977 - protein, 407 aa, Drosophila melanogaster
MSGPLPEISEEQRAILEKFRKQMDDALVGTHDDYFLVRWLRARKWNLEAAEKMLRASLKTRAMWNVDNIEKWDPPKALQEYLPYGLMGYDNEGSPVLVCPFANFDMWGMMHCVTRFEFQKYLVLLLERFMKIAYDQSQKHGWRARQLVVFFDMQDVNLKQYAWRPAAECVISTVKQYEANFPELLKMCYIINAPKLFSVAFNIVKKFLDENTTSKIVIYKSGVDRWQEQLFSHVNRKAFPKAWGGEMVDRNGDPQCKALMVWGGKLPEELYIDQSSQQSDRDFVEAQVPKGDKLKLHFKVNVEEQKILSWEFRTFDYDIKFGIYSVDDKTGEKRSEVPLGTVYSNEMDEIGYISTRPNTTYTVVFDNSASYLRSKKLRYWVDLISEEEEGISELTTQMDNTQIANQQ

SEQ ID NO: 22978 - protein, 192 aa, Arabidopsis thaliana
IEKASTMFLNYLTWKRSMLPKGHIPEAEIANDLSHNKMCMQGHDKMGRPIAVAIGNRHNPSKGNPDEFKRFVVYTLEKICARMPRGQEKFVAIGDLQGWGYSNCDIRGYLAALSTLQDCYPERLGKLYIVHAPYIFMTAWKVIYPFIDANTKKKIVFVENKKLTPTLLEDIDESQLPDIYGGKLPLVPIQET

SEQ ID NO: 22979 - protein, 252 aa, Arabidopsis thaliana
MEESQELALTQLRKSVEKLSSSTEGYDKPTLMRFLVARSMDPVKAAKMFVDWQKWRASMVPPTGFIPESEVQDELEFRKVCLQGPTKSGHPLVLVITSKHFASKDPANFKKFVVYALDKTIASGNNGKEVGGEKLVAVIDLANITYKNLDARGLITGFQFLQSYYPERLAKCYILHMPGFFVTVWKFVCRFLEKATQEKIVIVTDGEEQRKFEEEIGADALPEEYGGRAKLTAIQDVLLPQAAPVTLTNNNV

SEQ ID NO: 22980 - protein, 239 aa, Arabidopsis thaliana
MVFVVVVSSEKGYDKPTLMRFLVARSMDPVKAAKMFVDWQKWRASMVPPTGFIPESEVQDELEFRKVCLQGPTKSGHPLVLVITSKHFASKDPANFKKFVVYALDKTIASGNNGKEVGGEKLVAVIDLANITYKNLDARGLITGFQFLQSYYPERLAKCYILHMPGFFVTVWKFVCRFLEKATQEKIVIVTDGEEQRKFEEEIGADALPEEYGGRAKLTAIQDVLLPQAAPVTLTNNNV

SEQ ID NO: 22981 - protein, 256 aa, Glycine max; identical to SEQ ID NO: 674

SEQ ID NO: 22982 - protein, 256 aa, Glycine max; identical to SEQ ID NO: 674

SEQ ID NO: 22983 - protein, 264 aa, Glycine max
MEGVSPEPLRSELDSKSKHDTAKEDDDALKDSTEAEVTKIRLMRAFVESRDPSSKEENDLMMRRFLRARSLDVEKASAMFLKYLKWKRSFVPNGCISPSEIAEDIAQDKVFTQGLDKKGRPIVVTFAAKHFQSKNGADGFKRYVVFVLEKLCSRMPPGQEKFLAIADIKGWAYVNSDLRGYLNSLSILQDCYPERLGKMLIVHAPYMFMKIWKMIYPFIDENTKKKIVFVENKKLKSTLLEEIEESQIPDIYGGQMPLVPIQNS

SEQ ID NO: 22984 - protein, 227 aa, Glycine max
  unsure (1)..(227): unsure at all Xaa locations
CLREIDLIPWLQKDKXQKEEDDFMIRRFLRARDLDVEKASAMLLKYLKWRNSFVPNGSVSVSDVPNELAQDKVFMQGHDKIGRPILMVFGGRHFQNKDGLDEFKRFVVYVLDKVCASMPPGQEKFVGIAELKGWGYSNSDVRGYLSALSILQDYYPERLGKLFIVNAPYIFMKVWQIVYPFIDNKTKKKIVFVEKNKVKSTLLEEMEESQVPEIFGGSLPLVPIQDS

SEQ ID NO: 22985 - protein, 227 aa, Glycine max
MEGVSPEPLRSELDSKSKHDTAKEDDDALKDSTEAEVTKIRLMRAFVESRDPSSKEENDLMMRRFLRARSLDVEKASAMFLKYLKWKRSFVPNGCISPSEIAEDIAQDKVFTQGLDKKGRPIVVTFAAKHFQSKNGADGFKRYVVFVLEKLCSRMPPGQEKFLAIADIKGWAYVNSDLRGYLNALSILQIVFVENKKLKSTLLEEIEESQLPDIYGGQMPLVPIQNS

SEQ ID NO: 22986 - protein, 269 aa, Glycine max
  unsure (1)..(269): unsure at all Xaa locations
MDQGRDSALTQMRKSVEKLGSSAEGYGDPTLMRFLIARSMEVDKAAKMFLQWKKWRSAMVPNGFISESEIPDELEARKIFLQGLSQDKFPVMIVQTNRHFASKDQIQFKKFVVYLLDKTIASAFKGREIGTEKLIGIIDLQNISYKNIDARGLITGFQFLQAYYPERLAKCYMLHMPWFFVSVWKLVSRFLEKATLEKIVIVSNEDETREFVREVGEEVLPEMYGGRAKLEAIQDVELPXPRKRNNKLINMIAHTVIEESCRGHLMLKV

SEQ ID NO: 22987 - protein, 161 aa, Glycine max
  unsure (1)..(161): unsure at all Xaa locations
XETVRTREGALAKDTTETELTKIPLLRATVETLHPSSKEEDDFMIRRFLRARDLDVEKASAMFLKYLKWRHEFVPNGSVSVSDVPIELAQDKVFMQGRDKIGRPILIVFGRRHFQNKDGLDEFKRFVVYVLDKVCASMPPGQERLVGIAELKGWGYSNSDX

SEQ ID NO: 22988 - protein, 131 aa, Glycine max
  unsure (1)..(131): unsure at all Xaa locations
XRYVVFVLEKLCSRMPPGQEKFLAIADIKGWAYANSDLRGYLNALSILQTSCFXLQDCYPERLGKMVIVHAPYMFMKIWKMIYPFIDDNTKKKIVFVENKKLKSTLLEEIEESQLPDIYGGQMPLVPIQNS

SEQ ID NO: 22989 - protein, 134 aa, Glycine max
  unsure (1)..(134): unsure at all Xaa locations
XVRLREDDRRXIRRFLRARDLDVEKASAMLLKYLKWRHAFVPNGSVSVSDVPIELAQDKVFMQGRDKIGRPILMVFGGRLFQNKDGLXDEFKRFVVYVLDKVCASFSTLDPAXXTMNSIRGCAYRNSNLTIHTX

SEQ ID NO: 22990 - protein, 79 aa, Glycine max
  unsure (1)..(79): unsure at all Xaa locations
XLQDYYPERLGKLFIVNAPYIFMKVWKIIYPFIDNKTKKKIVFVEKNKVKSTLLEEMDESQVPEIFGGSLSLVPIQDAN

SEQ ID NO: 22991 - protein, 247 aa, Dictyostelium discoideum
MSGYVGNLSPEQEHQLGIIKSKIAEINDPVVEKEIQQLDDSMTLRFLRARKWNLKDSFDMLYEALKFRATFQDVGVEGITESMVVNELKSGKSYFHGVDKGGRPVCIVKTSRHDSYNRDLNESMRYCVYVMENGKSMLKDGIETCTLIFDMSDFSSKNMDYPLVKFMVELFQKFYPESLQKCLILNAPWIFMGIWHIIKHWLDPNTASKVSFVKTKQLVDYIPKDQLESSYGGTSTFKYTYEGKEVK

SEQ ID NO: 22992 - protein, 255 aa, Triticum aestivum
  unsure (1)..(255): unsure at all Xaa locations
MASSVGGDAGEGEWLKVAELRAMAEAQDPHVQEVDNLTLRRFLRARGHAVGKASSMLLKFVAWRREAVPGGVVPAELVRTELSHEMAYMGGADRAGRPVMLAFPAKHFSATRDMAGFKRYIVYLFDAMCARIPRGQEKFLCVVDLKGWGYANCDVRAYIAAIEILQNYYPERLGKALMIHVPYLFMKAWKLVQPFIDANTRDKFVFVDDKSLEETLRREMEDGQLPEMYGGKMPIVPLEXSEEVXGRGIDVPEIN

SEQ ID NO: 22993 - protein, 259 aa, Triticum aestivum
  unsure (1)..(259): unsure at all Xaa locations
MASSVEGGGDAGEGEWLKVAELKAMAEAQDPHVKEVDNMTLRRFLRARDHDVGKASAMLLKFVAWRREAVPGGVVPADLVRPXELSQDKARMGXGVDRAGRPVLLVFPARHFSADRDMAEHKRLVVYLLDRISARIPRGQDKFMCIVDLRGGGXYPNSDVRAYIAAIEIMQGYYPERLGKALMVHVPYIFMKAWKMVYPFIDTNTRDKFVFVDDKNLEETLRREMDESQVPEMYGGKLPTVPLTDDXASYNVRSINRCT

SEQ ID NO: 22994 - protein, 1008 aa, Schizosaccharomyces pombe
MKDSEHHHHGHNGFSKFLHKLGFGKSKGKSHKSNTSSIHERENTAAKGPASNVRPARPNVSTSSTSNEVRKSVPVGNPTVHTKTGSSSSPASKMRNTVNLQHIQAANQKTRNAEGERKVAQRRVQSDKAEANDAAMSSSAPTVDVSEGNSAAEPKITPDDSDTPRLNVDMNDKINVDEAAAKSDSKLNVDQINSTTESEKRVEKVNPNIANNPLKSPDAVAYSSETVSDEKQPTEHPVSANVPAKSEKAVCDENTKISLTNTEHYKFHSLRGDVEVVVGDLERDGRDTSLGDASVNEAAKETDVDSSRFISDEKAVTEDAMKTEHASNAPLTDERHFQFHSSEGDIEGIVGTMQRQRQSVSSYDTIVPSQFYKQKVVQNSPPSLLSTDNKIPESGSDHPSSQDNSSKASLVENSQTQSSTPRKPLPTTTSPKVNPEPHSESISDTRPSTPRKVPPSTVPKMNPKLQGGNSVTAPSTPSKVLPAMSPKVAPKFQGGRSSTAPSTPNKVLPAASAKAAPKLQEKAASFDIPNKSTIISTKSTVASPIKANENSPALKSKASFEFPKELDPDGTWNAPIPYPDANCPMAPTYRNLTSEQEEMYEEVLKYCLELKEIPVASNSSKKTDLIELERLWLTRECILRYLRATKWHVSNAKKRIVDTLVWRRHFGVNNMDPDEIQEENATGKQVLLGYDKDGRPCLYLYPARQNTKTSPLQIRHLVFSLECAIDLMPPGVETLALLINFKSSSNRSNPSVGQGKEVLNILQTHYCERLGRALVINIPWAVWGFFKLISPFIDPITREKLKFNEPLDRYVPKDQLDSNFGGSLHFEYHHEKYWPQLVELCKSRRLGILEKWRKMGSKIGTSEWDLKGGEEYVELMQQYVRPSLTNRSSSPTVTPTVNTDRQPKTLTNSADELSPQKRRVENPKPVVKDEGPVSIVEDEESTPVVTKKEDSIPVAQSTKADAGLDAENDLLPKSGSGVSETPAFSHARDVSTASFSDAVSFITADSIE

SEQ ID NO: 22995 - protein, 409 aa, Neurospora crassa
MATVLKVPLASPTPDSQPKPQAALTADQEEKYNWLLEQVKNWKEVPATEGKAGPITDREKFWLTRECLLRFLRATKWNQKEAEKRILGTLTWRREYGVEELTADHISPENETGKQIILGYDKEGRVCHYLNPGRQNTEASPRQVQHLVFMLERVIDLMPPQVETLSLLINFKSSKSRSNTAPGIGQAREVLNILQNHYPERLGRALIINVPWIVNGFFKLITPFIDPNTREKLKFNEDMKKYVPAEQLWTEFNGSLEFDYDHATYWPALQKMCVEKREAKYQRWVAGGQQIGELEDFITGHAQVGVAGPIAAATSAPEPTPAASAPAPAAEPETILAPEPALASETALAPPPVTASVPVATEAHDEAPAPAPEAAAIPEPTPAAVPVEEKKEEEKPKVVASTEVGETTA

SEQ ID NO: 22996 - protein, 317 aa, Mus musculus
MSDGVGTFRMVPEEEQELRAQLEQLTTKDHGPVFGPCSQLPRHTLQKAKDELNEKEETREEAVRELQELVQAQAASGEELALAVAERVQARDSAFLLRFIRARKFDVGRAYELLKGYVNFRLQYPELFDSLSMEALRCTIEAGYPGVLSSRDKYGRVVMLFNIENWHCEEVTFDEILQAYCFILEKLLENEETQINGFCIVENFKGFTMQQAAGLRPSDLKKMVDMLQDSFPARFKAIHFIHQPWYFTTTYNVVKPFLKNKLLQRVFVHGDDLDGFFQEIDENILPADFGGTLPKYDGKVVAEQLFGPRAEVENTAL

SEQ ID NO: 22997 - protein, 275 aa, Mus musculus
MRPGPLVGKQLNELPDHSPLLQPGLAELRRRVQEAGVPQTPQPLTDAFLLRFLRARDFDLDLAWRLMKNYYKWRAECPELSADLRPRSILGLLKAGYHGVLRSRDSTGSRVLIYRIAYWDPKVFTAYDVFRVSLITSELIVQEVETQRNGVKAIFDLEGWQVSHAFQITPSVAKKIAAVLTDSFPLKVRGIHLINEPVIFHAVFSMIKPFLTEKIKDRIHLHGNNYKSSMLQHFPDILPREYGGKEFSMEDICQEWTNFIMKSEDYLSSISETIQ

SEQ ID NO: 22998 - protein, 271 aa, Mus musculus
MAEMRPGPLVGKQLNELPDHSPLLQPGLAELRRRVQEAGVPQTPQPLTDAFLLRFLRARDFDLDLAWRLMKNYYKWRAECPELSADLRPRSILGLLKAGYHGVLRSRDSTGSRVLIYRIAYWDPKVFTAYDVFRVSLITSELIVQEVETQRNGVKAIFDLEGWQVSHAFQITPSVAKKIAAVLTDSFPLKVRGIHLINEPVIFHAVFSMIKPFLTEKIKDRIHLHGNNYKSSMLQHFPDILPREYGGKEFSMEDICQEWTNFIMKSEDYLS

SEQ ID NO: 22999 - protein, 278 aa, Mus musculus
MAEMRPGPLVGKQLNELPDHSPLLQPGLAELRRRVQEAGVPQTPQPLTDAFLLRFLRARDFDLDLAWRLMKNYYKWRAECPELSADLRPRSILGLLKAGYHGVLRSRDSTGSRVLIYRIAYWDPKVFTAYDVFRVSLITSELIVQEVETQRNGVKAIFDLEGWQVSHAFQITPSVAKKIAAVLTDSFPLKVRGIHLINEPVIFHAVFSMIKPFLTEKIKDRIHLHGNNYKSSMLQHFPDILPREYGGKEFSMEDICQEWTNFIMKSEDYLSSISETIQ

SEQ ID NO: 23000 - protein, 296 aa, Arabidopsis thaliana
MFRWKNSSQTEQEQKEAALREAKMKELKTLIGQLSGRNSLYCSDACLKRYLEARNWNVGKAKKMLEETLKWRSSFKPEEIRWNEVSGEGETGKVYKAGFHDRHGRTVLILRPGLQNTKSLENQMKHLVYLIENAILNLPEDQEQMSWLIDFTGWSMSTSVPIKSARETINILQNHYPERLAVAFLYNPPRLFEAFWKIVKYFIDAKTFVKVKFVYPKNSESVELMSTFFDEENLPTEFGGKALLQYNYEEFSKQMNQDDVKTANFWGLGHSNNNQLHASNGFSGAEIAPEPIQNHP

SEQ ID NO: 23001 - protein, 294 aa, Arabidopsis thaliana
MFRRRNAHQLDNDDSQQDNKVRELKSAIGPLSGHSLVFCSDASLRRFLDARNWDVEKAKKMIQETLKWRSTYKPQEIRWNQVAHEGETGKASRASFHDRQGRVVLIMRPAMQNSTSQEGNIRHLVYLLENAIINLPKGQKQMSWLIDFTGWSMAVNPPMKTTREIIHILQNYYPERLGIAFLYNPPRLFQAVYRAAKYFLDPRTAEKVKFVYPKDKASDELMATHFDVENLPKEFGGEATLEYDHEDFSRQMYEDDLKTAKYWGLEGKHYPKTNGFSPSDVVPEPAIEIASAAS

SEQ ID NO: 23002 - protein, 294 aa, Arabidopsis thaliana
MFRRRNAHQLDNDDSQQDNKVRELKSAIGPLSGHSLVFCSDASLRRFLDARNWDVEKAKKMIQETLKWRSTYKPQEIRWNQVAHEGETGKASRASFHDRQGRVVLIMRPAMQNSTSQEGNIRHLVYLLENAIINLPKGQKQMSWLIDFTGWSMAVNPPMKTTREIIHILQNYYPERLGIAFLYNPPRLFQAVYRAAKYFLDPRTAEKVKFVYPKDKASDELMTTHFDVENLPKEFGGEATLEYDHEDFSRQMYEDDLKTAKYWGLEGKHYPKTNGFSPSDVVPEPAIEIASAAS

SEQ ID NO: 23003 - protein, 299 aa, Glycine max
  unsure (1)..(299): unsure at all Xaa locations
MFHRWSNSHQQDQGSSELYAESKIKELKGVIGPLSGRSLTYCTDACFKRYLEARNWNVDKSKKMLEETLRWRSTYKPEEIRWHEVAMEGETGKLYRASFHDRQGRTVLILRPGMQNTTSMENQLRHLVYLLENAMLNLPPGQEQMSWLIDFTGWSITNNVPLKLARETINILQNHYPERLAIAFLYNPPRVFEAFWKIVKYFLDNKTFQKVKFVYPNNKDSVQVMKSYFDEENLPKELGGKSIMSYNHEEFSRLMVQDDLKCAAFWGSDGKLSNHIVNGNSASVLKXSSHNVWITVCRW

SEQ ID NO: 23004 - protein, 323 aa, Glycine max
  unsure (1)..(323): unsure at all Xaa locations
MFHRWSNSHQQDQGSSELCTESRCIKELKGAIGPLSGRSLMYCTDSCFKRYLEARNWNVDKSKKMLEETLRWRSTYKPEEIRWHEVAIEGETGKLYRANFHDRQGRNVLILRPGMQNTTSMENQLRHLVYLLENAMLNLPPGQEQMSWLIDFTGWSITNNVPLKLARETINIXQNHYPERLAIAFLYNPPXRVFEAFWKIVKYFLDNKTFQKVKFVYPKNKDSVELMKSYFDEENLPKELGGKSIMSYNHDEFSRLMVQDDLKCAAFWGSDGKLSNHIANGQSPXXFAMKPHPRHVKAMFGLPFAGGECTLKVRREKHSLCYF

SEQ ID NO: 23005 - protein, 301 aa, Glycine max
MFLLRRQTQNNQENDSSYQDTKVAELKTGLGPLSGRRLKYCTDACLRRYLEARNWNVDKAKKMLEETLKWRATYKPEEIRWAEIAHEGETGKVSRANFHDRLGRTVLIMRPGMQNTTSAEDNIRHLVYLLENAILNLSEGQEQMSWLIDFTGLSLSTNMSVKTSRDIIHILQNHYPERLAIAFMYNPPRIFQAFWKAPRFCQAIRFFLDPKTVQKVKFVYPNNKDSVELIKSLFATENLPSEFGGKTSLKYDHEEFSRLMTEDDVKPAKFWGLDEEPYPPKKGHSGAEVAPEPVPVQAVVS

SEQ ID NO: 23006 - protein, 296 aa, Glycine max
MFLLRRQTQNHHENDSSYQDTKVAELKTALGPLSGRQLKYCTDACLRRYLEARNWSVDKTTAARRRQKGEWRATYRPEEIRWAEIAHEGETGKVSRANFHDRHGRAVLIMRPGMQNTASAEDNIRHLVYLLENAILNLSEGQEQMSWLIDFTGLSLSTNISVKTSRDIIHILQNHYPERLAIAFLYNPPRIFQAFWKAIRFFLDPNTVQKVKFVYPNNKDSVELMKSLFDMENLPSEFGGKTSLKYDHEEFSRLMTEDDVKTAKFWGLDEEPYPPKKGHSGAEVAPEPVPVEAVVS

SEQ ID NO: 23007 - protein, 318 aa, Oryza sativa (japonica cultivar-group)
MSFLFKSSNGATTEKNLTLEEQQEKINDLRKELGEHSSEEIQDFLSDASCLRFLRARNWNVQKASKMMKSAVKWRVSYMPQKINWDDVAHEAETGKIYRADYKDKHGRTVLVLRPGLENTTSGKGQIKYLVYCLEKAIMSLTEDQEKMVWLTDFQSWTLGSTPLKVTRETVNVLQDCYPERLGLAILYNPPRIFESFWKIVKPFLDHETYKKVKFVYSSDKESQKIMADVFDLDKLDSAFGGRNPATFEYNSYAERMRADDIKMGSSFKSNGITLPQDHSHVSADKEANGGGSDASSEASFYSGTDSPNHEEGGSILA

SEQ ID NO: 23008 - protein, 324 aa, Dictyostelium discoideum
MESTASTSDSASAITTGLSEVDINQQSPPIILKEGEIFDPLKNLNEKQLEAFKEIKSNFSDLTDPTDIAFCTDMCFLRYLRARNYIVSKSEKMLRDTLEWRKKFRPQDIQLGGDIREIGSAGCVYVNKRDKKGRPIIFAVPRNDTLKNVPSELKFKNLVYWLEQGFSRMDEPKGIEQFCFIVDYKDFGSGNMDMKTNLEAMHFLLDHCPERMGQSLFLDPPALFWFAWKIISPFLNEVTLSKVRFINSKKVDGKRTFAELLEYVDIENLEQNLGGNLDYNYNIDEYLKENPDPIVDTPPITFSSCRIFFQFILLIYFINLIDFI

SEQ ID NO: 23009 - protein, 301 aa, Oryza sativa
  unsure (1)..(301): unsure at all Xaa locations
MFSFRKKHASRFDSDDIEQQEAKIQELRAALGPLSSSGKKYCTEACLRRYLEARNWNVDKSRKMLEESLKWRTAYRPEDIRWPEISVESETGKMYRASFVDREGRTGVIMRXPAKHNTSSHEGQVRFLVYTLENAILSLPEDQEKMVWLIDFTGWTLANATPIKTARECANILQNHYPERLAIGILFNPPKVFEAFWKVVKHFLDPKSIQKGEFXVYLKDEESMKILHKYIDPEVLPVEFGGKNNVVYSHEEYSKLMVKDDIKMASFWASDTKTDHVNKVINEHSVPEVTQQSSLVAAKAS

SEQ ID NO: 23010 - protein, 258 aa, Oryza sativa
MFSFRKKHASRFDSDDIEQQEAKIQELRAALGPLSSSGKKYCTEACLRRYLEARNWNVDKSRKMLEESLKWRTAYRPEDIRWVRFLVYTLENAILSLPEDQEKMVWLIDFTGWTLANATPIKTARECANILQNHYPERLAIGILFNPPKVFEAFWKVVKHFLDPKSIQKVNFVYLKNEESMKILHKYIDPEVLPVEFGGKNNVVYSHEEYSKLMVKDDIKMASFWASDTKTDHVNKVINEHSVPEVTQQSSLVAAKAS

SEQ ID NO: 23011 - protein, 342 aa, Triticum aestivum
  unsure (1)..(342): unsure at all Xaa locations
MFRRKHTSHFNSDDAEQRQAKINELRAALGPVSARGEKYCSEACLARYLEARNWNVDKSRKMLEESLKWRAASKPEDTRWPDVSVEAETGKMYRATFTDREGRTVVIMRPAKQNTSSHEGQLRYLIYTLENAILSLPQGLDKMVWVIDFTGWTLAHATPLKTARDSVNIVQNHYPERLSAAFLFNPPKIFEASFKVIKVFLDPKSTQKLNFVYKENEESMKTMYNHIDPEVLPVEFGGKNIVVYNHEDYSKLMTKDDIKTTSFWAADGSHAVNGGSVPQVIPQSSPIVAKASXGTSASHLTCYCKSKLRSFSEPMSRFTALKEEYVYRYVEDVWINKCNCNI

SEQ ID NO: 23012 - protein, 292 aa, Triticum aestivum
MFRKKQASHFDSDDAEQRQAKIKELKAALGPFSARGKKYCDEACLVRYLEARNWNVDKSRKMLEESIKWRAAKRPEDIRWPDVSVEAETGKMYRATFTDREGRTVVVMRPAKQNTSSHEGQLQYLVYTLENAVLSCLKVMTKMVWLIDFTGWTLAHATPFKTARDCMNVLQNHYPERLSIAFLFNPPKVFEASFKVLKVLVDPKSAQKLNFVYKENEESMKTMYSHIDPEVLPVEFGGKNNVVYNHEDYSKLMIKDDIKRASFWAADVSHVVNVDSVPEVKPQSSLIVAKAS

SEQ ID NO: 23013 - protein, 444 aa, Schizosaccharomyces pombe
MPEGAGRPWNLTELEEEKLKTMWSYLFKLFGITLLERTESWYTVKTHLSDDSSSSSSHRLSSVSYAKSRTRLELTSSSHGSDTRSFNDKTKNVHLERVEKIASEWDPEGLRVCFWDAVNCDDPDGLLLRFLRARKWNVEAALEMFMKTVHWRSREMNVGEIVCNADHLDKDDDFVRQLRIGKCFIFGEDKHNRPVCYIRARLHKVGDVSPESVERLTVWVMETARLILKPPIETATVVFDMTDFSMSNMDYGPLKFMIKCFEAHYPECLGECIVHKAPWLFQGVWSIIKSWLDPVVVSKVKFTRNYRDLQQYINPDNILKEFGGPNPWRYTYPEPCQNEAEALKNVEARKSLRAKKDAIAKQYEEVTMDWILNNGDMAEVKQKRRKLASQLIDAYWNLDKYIRARSVYDRMGLIAPQTSHTLLLSQPTNGDVKESMVEVTSSAT

SEQ ID NO: 23014 - protein, 350 aa, Saccharomyces cerevisiae
MGLFSRKRDHTPAVPKEKLIPCDKIFLDPPAKYGNAPLLEPISEDQNEKYRAVLRHFQDDDLKLPENLNDLDNGTHANDRPLSDWEKFWLSRECFLRYLRANKWNTANAIKGLTKTLVWRREIGLTHGKEDKDPLTADKVAVENETGKQVILGFDNAKRPLYYMKNGRQNTESSFRQVQELVYMMETATTVAPQGVEKITVLVDFKSYKEPGIITDKAPPISIARMCLNVMQDHYPERLAKCVLINIPWFAWAFLKMMYPFLDPATKAKAIFDEPFENHIEPSQLDALYNGLLDFKYKHEVYWPDMVKKVDDLRLKRFDRFLKFGGIVGLSEYDTKGQHDELKYPVDMVI

SEQ ID NO: 23015 - protein, 351 aa, Saccharomyces cerevisiae
MFKRFSKKKEAPEDPKNLINIDKPIKELPASIAIPKEKPLTGEQQKMYDEVLKHFSNPDLKVYTSEKNKSEDDLKPLEEEEKAWLTRECFLRYLRATKWVLKDCIDRITMTLAWRREFGISHLGEEHGDKITADLVAVENESGKQVILGYENDARPILYLKPGRQNTKTSHRQVQHLVFMLERVIDFMPAGQDSLALLIDFKDYPDVPKVPGNSKIPPIGVGKEVLHILQTHYPERLGKALLTNIPWLAWTFLKLIHPFIDPLTREKLVFDEPFVKYVPKNELDSLYGGDLKFKYNHDVYWPALVETAREKRDHYFKRFQSFGGIVGLSEVDLRGTHEKLLYPVKSESSTV

SEQ ID NO: 23016 - protein, 222 aa, Drosophila melanogaster
MSSEELAPINEQDFKDLKERMKLIVEADPKQYHNDFSLRRYLRAFKTTDDAFQAILKTNKWRETYGVDKLSEMDRSQLDKKARLLRHRDCIGRPVIYIPAKNHSSERDIDELTRFIVYNLEEACKKCFEEVTDRLCIVFDLAEFSTSCMDYQLVQNLIWLLGKHFPERLGVCLIINSPGLFSTIWPAIRVLLDDNTAKKVKFVADEAELCQYLIPDILPTDM

SEQ ID NO: 23017 - protein, 317 aa, Homo sapiens
MSEGVGTFRMVPEEEQELRAQLEQLTTKDHGPVFGPCSQLPRHTLQKAKDELNEREETREEAVRELQEMVQAQAASGEELAVAVAERVQEKDSGFFLRFIRARKFNVGRAYELLRGYVNFRLQYPELFDSLSPEAVRCTIEAGYPGVLSSRDKYGRVVMLFNIENWQSQEITFDEILQAYCFILEKLLENEETQINGFCIIENFKGFTMQQAASLRTSDLRKMVDMLQDSFPARFKAIHFIHQPWYFTTTYNVVKPFLKSKLLERVFVHGDDLSGFYQEIDENILPSDFGGTLPKYDGKAVAEQLFGPQAQAENTAF

SEQ ID NO: 23018 - protein, 316 aa, Bos taurus
SEGAGTFRMVPEEEQELRAQLERLTTKDHGPVFGPCSQLPRHTLQKAKDELNEKEETREEAVRELQELVQAEAASGQELAVAVAERVQGKDSAFFLRFIRARKFHVGRAYELLRGYVNFRLQYPELFDSLSPEAVRCTVEAGYPGVLSTRDKYGRVVMLFNIENWDSEEITFDEILQAYCVILEKLLENEETQINGFCIIENFKGFTMQQAAGLRPSDLRKMVDMLQDSFPARFKAIHFIYQPWYFTTTYNVVKPFLKSKLLQRVFVHGEDLSSFYQEFDEDILPSDFGGTLPKYDGKAVAEQLFGPRDQTENTAF

SEQ ID NO: 23019 - protein, 317 aa, Bos taurus
MSEGAGTFRMVPEEEQELRAQLERLTTKDHGPVFGPCSQLPRHTLQKAKDELNEKEETREEAVRELQELVQAEAASGQELAVAVAERVQGKDSAFFLRFIRARKFHVGRAYELLRGYVNFRLQYPELFDSLSPEAVRCTVEAGYPGVLSTRDKYGRVVMLFIIENWDSEEITFDEILQAYCVILEKLLENEETQINGFCIIENFKGFTMQQAAGLRPSDLRKMVDMLQDSFPARFKAIHFIYQPWYFTTTYNVVKPFLKSKLLQRVFVHGEELSSFYQEFDEDILPSDFGGTLPKYDGKAVAEQLFGPRDQTENTAF

SEQ ID NO: 23020 - protein, 280 aa, Plasmodium falciparum 3D7
MCVYHYYVHYHKNNLKSLRYIFCGKELDDFEKQKIRELKEFVNKLKLKEKDKEKDKEKEVETYQTIFKNTLFDDDNYVLRFLQGNEFVFERCYNDMLRHLTWRKENLPIPLSDVQIFLDKGYCYIHGRDKQMHPIIIINCKNIISANTKDVLKVLYYWLEFCISKLLIEGKVEQWRVIIDLTSCSVLNIPIATLKDISKNLSCNYRSRLCKMLVLSAPLVVTGIWHMLKSIIPVVTQQKITITSSEKEKKLLDQVQANQLEKKFGGTCENATDFTEPILP

SEQ ID NO: 23021 - protein, 259 aa, Triticum aestivum
  unsure (1)..(259): unsure at all Xaa locations
MDCGTDERQYGHGGDRDAAEWKKVAELREFVEAQDPSAKEEDDFALRRFLRARDHNINKASVMLLRYLAWKRVTKPHGFISDDEVRGEIAKGRDRHQGFDRLGRPMSYLYSGRHFPVRRDHEDLKRYVVYVFNKICTKLPAGQEKFAAVIDLKGWGYANCDIRGYLAGLDIMQSYYPDRLGRVFLIHVPYLFMAAWKIVFPLIDDKTKKKFVFVADRDLDATLRDAIDESQLPEEYGGKLKXLGLQQFTIVQVHLMINR

SEQ ID NO: 23022 - protein, 175 aa, Triticum aestivum
  unsure (1)..(175): unsure at all Xaa locations
GRFLRARDHNIGKASAMLLQYLSWKRVAKPHGSISADEVRDEIAKDRVRMQGFDRLNRPMAYLYGARHFPARRDLDEFKRYVTYVLDKICTRLPVGQEKFAAVIDMKGWGYANCDIRGYVAALEIMQGYYPERLGRVFLIHVPYMFMAAWKMVYPFIDDRTRKKFVFVTDKDLKX

SEQ ID NO: 23023 - protein, 154 aa, Triticum aestivum
  unsure (1)..(154): unsure at all Xaa locations
MSANTAXGDGGEAEWKKVVELRAVAEAQDPAAKEEDDFVLRRFLRARDYNIGKASMMLLQYLAWKRVAKPHGSISDEEVRGEIAKKRVDMQGFDCLGRPMAYIYGARHFPARRDLDGFKRYVAYVLDKICTMLPVGXEKFAAVIDLKGWGYANX

SEQ ID NO: 23024 - protein, 303 aa, Triticum aestivum
  unsure (1)..(303): unsure at all Xaa locations
SREPSSRASRSVSSQQRPSASTYLVARFPSSRANQSRTAGRLRQEGKRQGLRRRGGGEAERACRRRRRPGRVDDGGRAPGGATRRXVPAARRAPAPRRRRXLRTRGPNVGKAAAMFLKSLPWTRATQPRGSITEAAVRGELVQDKLYVQGFDSAGRPLVYLFGHRLVAAGRPLEFKRYVVYILDNTCTKLPAGPDYDIRAKLAALGGLPNCDPRPLRPAFLILLPYVPVRPGRVVLPLVPYVFMAAWKMVYPFIDDNTKKKFVFVADKDLDATLRDAIDVSQLPEQYGGKLRLEGYKSSSTCN

SEQ ID NO: 23025 - protein, 120 aa, Triticum aestivum
  unsure (1)..(120): unsure at all Xaa locations
MDCGGEEQARQNGHAGDGGDPAEWKKVAELRAVVEAQDPAAKEEDDFMLRRFLRARDHNISKASAMFLKYLSWKRGAKPRGSITEAEVRGELVQDKLYIQGFDKTGRPMIYLFGNRHFAX

SEQ ID NO: 23026 - protein, 129 aa, Triticum aestivum
  unsure (1)..(129): unsure at all Xaa locations
KFASVVDLKGWGYANCDIRAKLAALEIMQNYYPERLGRVXLIHVPYVFMAAWXMXYPFIDDNTKXKFXFVADKDLDGTLRDAIDLSQLPEQYGGKLRLEGYKNNAIVNVXLIWFIKGVQLCESMLHCPA

SEQ ID NO: 23027 - protein, 282 aa, Zea mays
  unsure (1)..(282): unsure at all Xaa locations
PHDPPPTRPPAAEVVGHGGAGAARAGGXRRRGXEWKQVAELRAVTQAQDPSCKDEDDYTLRRFLRARDHNIGKASAMLLKYLKWKPAAKPHGAIAAAEVAREAAQGKLYLQGHDREGXRPLIYGFGARHHPARRDLDEFKRYVVHVLDATVARLPPPPPPPGDARQEKFAAVADLAGWGYANCDIRGYLAALDIMQSYYPERLARVFLVHVPYVFMAAWKIVYPFIDDNTKKKFVFVPDKDLDRTLREAIDDSQLAEIYGGKLKLVAPPANXTATTENGSIP

SEQ ID NO: 23028 - protein, 169 aa, Zea mays
  unsure (1)..(169): unsure at all Xaa locations
XSQDKLCMGGVDRAGRPILVAFAARHFSAGRDMAEFKSFVVYFFDKICARIPRGQEKFLCIVDLKGWGYSNCDVRAYIAAIEILQNYYPERLGKALMIHVPYIFMKAWKMIYPFIDTNTRDKFVFVEDKSLQETLRREIDEGQLPEFLGGKMDVIPLKDYGVQQQPQAV

SEQ ID NO: 23029 - protein, 175 aa, Zea mays
  unsure (1)..(175): unsure at all Xaa locations
MGGVDRTGRPIIVGLPPSHYSANRDMAEFKSFVVYFFDKICARIPRGQEKFLAIMDLKGWGYANCDVRAYIAAIEIMQNYYPERLGKALMINVPYIFLKVWKTMIYPFIDANTRDKFVFVDDKSLRETLRREIDESQLPEFLGGKMPLVSLKDYAQQPQPVCDVSRSXDVPARGP

SEQ ID NO: 23030 - protein, 362 aa, Zea mays
  unsure (1)..(362): unsure at all Xaa locations
RPTRPLANPIPDPDSPLASRSLAAAPSFSPIGSATLESRPRRYRLSGSGAPSSTPPPPSSIPPVQGPSLVYRAVLFGGLSNDVISAGALGITTAQLVRINDLHSRTVHQENALSNRLATLQEDIANRPLLPIVRQRELATATRLGAAASGSCDGAARRWLRAARLGEXRAGIVEAVDNLTLRRFLRARDHDVDKASAMFLKFLKWRREAAPGGSVPEEQVRRELSQDKLCMGGVDRAGRPILVAFAARHFSAGRDMAEFKSFVVYFFDKICARIPRGQEKFLCIVDLKGWGYSNCDVRAYIAAIEILQYFYRKKGGRVNKVHTKKAAAPKIAKQESSDDDTSDETFESDEFSEFLDANSSSH

SEQ ID NO: 23031 - protein, 177 aa, Zea mays
  unsure (1)..(177): unsure at all Xaa locations
MANAGGGAAGEGEWLKVAQLRALVQEDHRAKEVDNLTLRRFLRARGHNVDKAAAMLLKFLRWRAEAAPRXGGTVREEQVRGELEQDKIYMGGVVRTGRPIIVGLLAKHYSANRDMAEFKSFVVYFFDKICARIPRGQEKFLAIMDLKGWGYANCDVRAYIAAIEIMQNYYXVRPCPR

SEQ ID NO: 23032 - protein, 388 aa, Schizosaccharomyces pombe
MFSRLWVRCRCSTALSAAAAGTFFFRRSQKQPEPETVDEKVSFESYSPLKLMIQKTWPRFQEHKEYRESFIRLAKCDSPDAILVRFLASCNNDSHEASQKLINTLQWRVDTGVERIVERGELYAKETNDDQFLEQLRTGKVTMLGRDLSDRPICYIQVHLHQPSKLTQNSLREMTVWVMETMRLFLRPQKTLKDSMDSPQNVNVLFDLSNFSLHNMDYSFVKYLASCLEYYYPQSLGVCILHKSPWIFRSVWNIIKGWIKPEIAAKIVFTQSANDLEKYIDYSVIPTSLGGGNKKIFQYIEPVEHENDAVIEDSAEKTAALARYYAYFSEWEQHSLNWAKLDDDDAQNEKVRLCCDAAGTNFANCYWNVDKYIRARTVYDRLKWIGNV

SEQ ID NO: 23033 - protein, 304 aa, Saccharomyces cerevisiae
MVTQQEKEFLESYPQNCPPDALPGTPGNLDSAQEKALAELRKLLEDAGFIERLDDSTLLRFLRARKFDVQLAKEMFENCEKWRKDYGTDTILQDFHYDEKPLIAKFYPQYYHKTDKDGRPVYFEELGAVNLHEMNKVTSEERMLKNLVWEYESVVQYRLPACSRAAGHLVETSCTIMDLKGISISSAYSVMSYVREASYISQNYYPERMGKFYIINAPFGFSTAFRLFKPFLDPVTVSKIFILGSSYQKELLKQIPAENLPVKFGGKSEVDESKGGLYLSDIGPWRDPKYIGPEGEAPEAFSMK

SEQ ID NO: 23034 - protein, 296 aa, Saccharomyces cerevisiae
QQEKEFLESYPQNCPPDALPGTPGNLDSAQEKALAELRKLLEDAGFIERLDDSTLLRFLRARKFDVQLAKEMFENCEKWRKDYGTDTILQDFHYDEKPLIAKFYPQYYHKTDKDGRPVYFEELGAVNLHEMNKVTSEERMLKNLVWEYESVVQYRLPACSRAAGHLVETSCTIMDLKGISISSAYSVMSYVREASYISQNYYPERMGKFYIINAPFGFSTAFRLFKPFLDPVTVSKIFILGSSYQKELLKQIPAENLPVKFGGKSEVDESKGGLYLSDIGPWRDPKYIGPEGEAPE

SEQ ID NO: 23035 - protein, 408 aa, Saccharomyces cerevisiae
MSFDRQLTEDQEVVLKQIWTHLFHLWQVPVDGTHIFPNNSLHSSSTPAKKKKSSWFSKLQSSDHTQDSSEAAEAAHLYEKGKIHKALANLDPQTTKKQFWHDIKNETPDATILKFIRARKWNADKTIAMLGHDLYWRKDTINKIINGGERAVYENNETGVIKNLELQKATIQGYDNDMRPVILVRPRLHHSSDQTEQELEKFSLLVIEQSKLFFKENYPASTTILFDLNGFSMSNMDYAPVKFLITCFEAHYPESLGHLLIHKAPWIFNPIWNIIKNWLDPVVASKIVFTKNIDELHKFIQPQYIPRYLGGENDNDLDHYTPPDGSLDVHLKDTETRAMIEKEREELVEQFLTVTAQWIEHQPLNDPAYIQLQEKRVQLSTALCENYSKLDPYIRSRSVYDYNGSLKV

SEQ ID NO: 23036 - protein, 310 aa, Saccharomyces cerevisiae; identical to SEQ ID NO: 670

SEQ ID NO: 23037 - protein, 653 aa, Neurospora crassa
MRLPPPSTPTQLLRLRLTRSALSRSAVSTTSPLATSTCPSSQRTVSTKVGAATITPGLRFQSLLFPPSTGITTTTTTTTTAFFSRNNLSTSTTTVNKRDQTVKPTVTLAPSTPVVLRASVTGLGLLFVLGLGLGYGITGFLGQKSTEQQELPSEASYTTIQNNIQDILDDESSTTNMSREIAPGRPGNLTPEQEEKLKQLWKLIFQVCGVSSPSPSSESSTPAATSDDVSIKGDDKKKKSKLSMFSRKHKKDSDDTTPDSASTASGSMPGSPAIVLNASTTSGDDDKYNQLSKFHETLASQSPAAIRETIWSMVKHDHPDALVLRFLRARKWDVEKALVMFISTMNWRDNEMKVDADIMRSGEGGAAEAEKMEAKTSEEIAKKKLAIDFLTQTRMGKSYVHGVDKQGRPICFVRVRLHKQGEQSEESLERYTVYLIETCRMLLQGSVDTATIVFDMTGFSMANMDYAPVKFMVKCFEANYPECLGAVLVHKAPWIFQGIWRVIRGWLDPVVANKVHFTNNISEMSEFISPEKLPKDLDGQEDWEYKYVEPVPGENDRMKDEETISKLQAARAELVKEYEEATLQWIQASGNSEELKKKRDAIAEKLRVDYWNLDPYVRARSFYDRIGVLLPGGKLDPFLEGKKDGLAVRVVGV

SEQ ID NO: 23038 - protein, 327 aa, Macaca fascicularis
MTHLQAGLSPETLEKARLELNENPDTLHQDIQEVRDMVITRPDIGFLRTDDAFILRFLRARKFHHFEAFRLLAQYFEYRQQNLDMFKSFKATDPGIKQALRDGFPGGLANLDHYGRKILVLFAANWDQSRYTLVDILRAILLSLEAMIEDPELQVNGFVLIIDWSNFTFKQASKLTPSMLRLAIEGLQDSFPARFGGIHFVNQPWYIHALYTVIRPFLKEKTRKRIFLHGNNLNSLHQLIHPEILPSEFGGMLPPYDMGTWARTLLDHEYDDDSEYNVDSYSMPVKEVEKELSPKSMKRSQSVVDPTVLKRMDKNEEENMQPLLSLD

SEQ ID NO: 23039 - protein, 327 aa, Macaca fascicularis
MTHLQAGLSPETLEKARLELNENPDTLHQDIQEVRDMVITRPDIGFLRTDDAFILRFLRARKFHHFEAFRLLAQYFEYRQQNLDMFKSFKATDPGIKQALKDGFPGGLANLDHYGRKILVLFAANWDQSRYTLVDILRAILLSLEAMIEDPELQVNGFVLIIDWSNFTFKQASKLTPSMLRLAIEGLQDSFPARFGGTHFVNQPWYIHALYTVIRPFLKEKTRKRIFLHGNNLNSLHQLIRPEILPSEFGGMLPPYDMGTWARTLLDHEYDDDSEYNVDSYSMPVKEVEKELSPKSMKRSQSVVDPTVLKRMDKNEEENMQPLLSLD

SEQ ID NO: 23040 - protein, 802 aa, Mus musculus
MAHRCLLLWSRGGCRRGLPPLLVPRGCLGPDRRPCLRTLYQYATVQTASSRRSLLRDVIAAYQRFCSRPPKGFEKYFPNGKNGKKASEPKEAVGEKKEPQPSGPQPSGGAGGGGGKRRGKKEDSHWWSRFQKGDFPWDDKDFRMYFLWTALFWGGVMIYFVFKSSGREITWKDFVNNYLSKGVVDRLEVVNKRFVRVTFTPGKTPVDGQYVWFNIGSVDTFERNLETLQQELGIEGENRVPVVYIAESDGSFLLSMLPTVLIIAFLLYTIRRGPAGIGRTGRGMGGLFSVGETTAKVLKDEIDVKFKDVAGCEEAKLEIMEFVNFLKNPKQYQDLGAKIPKGAILTGPPGTGKTLLAKATAGEANVPFITVSGSEFLEMFVGVGPARVRDLFALARKNAPCILFIDEIDAVGRKRGRGNFGGQSEQENTLNQLLVEMDGFNTTTNVVILAGTNRPDILDPALLRPGRFDRQIFIGPPDIKGRASIFKVHLRPLKLDSALEKDKLARKLASLTPGFSGADVANVCNEAALIAARHLSDAINEKHFEQAIERVIGGLEKKTQVLQPEEKKTVAYHEAGHAVAGWYLEHADPLLKVSIIPRGKGLGYAQYLPKEQYLYTKEQLLDRMCMTLGGRVSEEIFFGRITTGAQDDLRKVTQSAYAQIVQFGMNEKVGQISFDLPRQGDMVLEKPYSEATARMIDDEVRILISDAYRRTVALLTEKKADVEKVALLLLEKEVLDKNDMVQLLGPRPFTEKSTYEEFVEGTGSLDEDTSLPEGLQDWNKEREKEEKKEKEKEEPLNEKVVS

SEQ ID NO: 23041 - protein, 663 aa, Mus musculus
MQKGEFPWDDKDFRSLAVLGAGVAAGFLYFYFRDPGKEITWKHFVQYYLARGLVDRLEVVNKQFVRVIPVPGTTSERFVWFNIGSVDTFERNLESAQWELGIEPTNQAAVVYTTESDGSFLRSLVPTLVLVSILLYAMRRGPMGTGRGGRGGGLFSVGETTAKILKNNIDVRFADVAGCEEAKLEIMEFVNFLKNPKQYQDLGAKIPKGAMLTGPPGTGKTLLAKATAGEANVPFITVNGSEFLEMFVGVGPARVRDMFAMARKHAPCILFIDEIDAIGRKRGRGHLGGQSEQENTLNQMLVEMDGFNSSTNVVVLAGTNRPDILDPALTRPGRFDRQIYIGPPDIKGRSSIFKVHLRPLKLDGSLSKDALSRKLAALTPGFTGADISNVCNEAALIAARHLSPSVQERHFEQAIERVIGGLEKKTQVLQPSEKTTVAYHEAGHAVVGWFLEHADPLLKVSIIPRGKGLGYAQYLPREQFLYTREQLFDRMCMMLGGRVAEQLFFGQITTGAQDDLRKVTQSAYAQIVQFGMSEKLGQVSFDFPRQGETMVEKPYSEATAQLIDEEVRCLVRSAYNRTLELLTQCREQVEKVGRRLLEKEVLEKADMIELLGPRPFAEKSTYEEFVEGTGSLEEDTSLPEGLKDWNKGREEGGTERGLQESPV

SEQ ID NO: 23042 - protein, 672 aa, Rattus norvegicus
MVKIVNSDFPVAVNISGPLGTPAPEPLRLYQYATVQTANSRSSLLRDVIAAYQRFCSRPPKGFEKYFPNGKNGKKASESKEAVGEKKESQLSGPQSSGGASGGGGKRRGKKEDSHWWSRFQKVDRLEVVNKRFVRVTFTPGKTPVDGQYVWFNIGSVDTFERNLETLQQELGIEGENRVPVVYIAESDGSFLLSMLPTVLIIAFLLYTIRRGPAGIGRTGRGMGGLFSVGETTAKVLKDEIDVKFKDVAGCEEAKLEIMEFVNFLKNPKQYQDLGAKIPKGAILTGPPGTGKTLLAKATAGEANVPFITVSGSEFLEMFVGVGPARVRDLFALARKNAPCILFIDEIDAVGRKRGRGNFGGQSEQENTLNQLLVEMDGFNTTTNVVILAGTNRPDILDPALLRPGRFDRQIFIGPPDIKGRASIFKVHLRPLKLDSALEKDKLARKLASLTPGFSGADVANVCNEAALIAARHLSDAINEKHFEQAIERVIGGLEKKTQVLQPEEKKTVAYHEAGHAVAGWYLEHADPLLKVSIIPRGKGLGYAQYLPKEQYLYTKEQLLDRMCMTLGGRVSEEIFFGRITTGAQDDLRKVTQSAYAQIVQFGMNEKVGQISFDLPRQGDMVLEKPYSEATARMIDDEVRILISEAYKRTVALLTEKKADVEKECCEIRLES

SEQ ID NO: 23043 - protein, 628 aa, Nostoc sp. PCC 7120
MKFSWRVLVLWTLPALVIGFFFWQGTFAGAPADMSKNAANTRMTYGRFLEYVDAGRVTSVDLYEGGRTAIVEAQDQDIENRVQRWRVDLPVSAPELISKLKDKKVSFDAHPARNDGAIWGLLGNLVFPILLITGLFFLFRRSNNLPGGPGQAMNFGKSKARFQMEAKTGVKFDDVAGIEEAKEELQEVVTFLKQPERFTAVGARIPKGVLLVGPPGTGKTLLAKAIAGEAGVPFFSISGSEFVEMFVGVGASRVRDLFKKAKDNAPCIIFIDEIDAVGRQRGAGIGGGNDEREQTLNQLLTEMDGFEGNTGIIIIAATNRPDVLDAALLRPGRFDRQVTVDAPDIKGRLEVLQVHARNKKLDPSVSLEAIARRTPGFTGADLANLLNEAAILTARRRKEGITLSEIDDAVDRVVAGMEGTPLVDSKSKRLIAYHEVGHALVGTLLKDHDPVQKVTLIPRGQAQGLTWFTPNEEQGLISRSQLKARITGALGGRAAEEIIFGSAEVTTGAGGDLQQVSGMARQMVTRFGMSDLGPLSLESQQGEVFLGRDWMTRSDYSESIAARIDSQVRLIVDECYQNAKKIMREHRTVTDRIVDLLIEKETIDGEEFRQIVAEYTDVPDKQQFVPQL

SEQ ID NO: 23044 - protein, 656 aa, Nostoc sp. PCC 7120
MAIFARRIGLNQHSAYGSRQRVIVMKNFGKKALIKQQSPKRVAWTGALAASLIMLPTMFGGNPVLAQKAERESLSYGELIQKVNQEQVKRVELDETEQIAKVYLKGQKPDAPPIQVRLLEQNNELINRLKEKNVDFGEISSANSRAAVGLLINLMWILPLVALMLLFLRRSTNASSQAMNFGKSRARFQMEAKTGVKFDDVAGIEEAKEELQEVVTFLKQPERFTAVGARIPKGVLLVGPPGTGKTLLAKAIAGEAAVPFFSISGSEFVEMFVGVGASRVRDLFKKAKDNAPCLIFIDEIDAVGRQRGTGIGGGNDEREQTLNQLLTEMDGFEGNTGIIIIAATNRPDVLDSALLRPGRFDRQVIVDAPDLKGRLEILQVHSRNKKVDPSVSLEAIARRTPGFTGADLANLLNEAAILTARRRKEAITILEIDDAVDRVVAGMEGTPLVDSKSKRLIAYHEVGHGLVGTLLKDHDPVQKVTLIPRGQAQGLTWFTPNEEQGLISRSQLKARITSTLAGRAAEEIVFGKPEVTTGAGDDLQKVTSMARQMVTKFGMSELGPLSLENQSGEVFLGRDWMNKSDYSEEIAAKIDSQVREIINTCYQTSKELLQTNRVVMERLVDLLTEQETIEGDLFRKIVSESQNPVVDEQLSMVNSQ

SEQ ID NO: 23045 - protein, 633 aa, Rhodobacter sphaeroides
MGNARNIAFWVVLFLLILALFNLFSGGQTTSSSRTISYSDFIARVDNGEVSSVTLDGERVMVRGKDGTQYVAIKPQGEEVTDRLINHGVEVRAEAQEQSGFFSLISLWLPFLVLIGIWIFFMNRMQGGGRGGAMGFGKSRAKLLTEKQGRVTFDDVAGIDEAKEELEEIVEFLRNPQKFSRLGGKIPKGALLVGPPGTGKTLLARAIAGEAGVPFFTISGSDFVEMFVGVGASRVRDMFEQAKKNAPCIVFIDEIDAVGRARGVGIGGGNDEREQTLNQLLVEMDGFEANEGVIIVAATNRKDVLDPALLRPGRFDRTIHVPNPDIKGREKILSVHARKVPLGPNVDLRLIARGTPGFSGADLMNLVNEAALLAARVGRRFVTMDDFENAKDKVMMGAERRSMVLTADQKEKTAYHEAGHAIVGLNLPKCDPVYKATIIPRGGALGMVVSLPEMDRLNMHKDEGKQKIAMTMAGKAAEIIKYGEEAVSSGPAGDIQQASALARAMVMRWGMSDVVGNIDYAEAHEGYQGNTAGFSVSAETKKMIEAEVKRLIDEGYQTAYRILTEKSEEFERLAKGLLEYETLTGDQIRRVIAGEPIDSDDDADRPVGGGSVAAIPKTRPKVIKADGGLEPSV

SEQ ID NO: 23046 - protein, 643 aa, Rhodospirillum rubrum
MKDLNLSRNLLLWIIIAVLLVVLFNLFQTSAPRGPQTTVPYSDFLSSVDAREVRDVVIKGDSISGHTTDGRAFTTYAPRDADMVSHLRDSGVQISAVPAEDNVPTFWSILISWFPFLLLIGVWIFFMRQMQSGGGKAMGFGKSRAKLLTEKTGRVTFDDVAGIDEAKQELEEVVEFLRDPQKFQRLGGKIPKGVLLVGPPGTGKTLLARAIAGEANVPFFTISGSDFVEMFVGVGASRVRDMFEQGKKNAPCLIFIDEIDAVGRHRGAGLGGGNDEREQTLNQLLVEMDGFEANEGVILIAATNRPDVLDPALLRPGRFDRQVTVSNPDIMGREKILKVHMRKTPLGPDVDAKVIARGTPGFSGADLSNLVNEAALLAARKGKRVVTMAEFEEAKDKVLMGAERRSMVMTEDEKEKTAYHEAGHALIAIHQEGHDPLHKVTIIPRGRALGVTMSLPERDRYGYSLKELKARIAMAFGGRVAEEMIYGTENVTTGASNDIMQATDLARRMVTEFGFSEKLGPLRYTDNQEEVFLGHSVTQHKNLSDETARMIDEEVRRFVEQGEARAREILGKYKDELEIITRGLLEYETLSGDEVNKLLRGEDLNRAEQPAPPRDRSGRRASVPTSGPAAGGVGGDPEPQPGA

SEQ ID NO: 23047 - protein, 627 aa, Synechocystis sp. PCC 6803
MKFSWRTALLWSLPLLVVGFFFWQGSFGGADANLGSNTANTRMTYGRFLEYVDAGRITSVDLYENGRTAIVQVSDPEVDRTLRSRVDLPTNAPELIARLRDSNIRLDSHPVRNNGMVWGFVGNLIFPVLLIASLFFLFRRSSNMPGGPGQAMNFGKSKARFQMDAKTGVMFDDVAGIDEAKEELQEVVTFLKQPERFTAVGAKIPKGVLLVGPPGTGKTLLAKAIAGEAGVPFFSISGSEFVEMFVGVGASRVRDLFKKAKENAPCLIFIDEIDAVGRQRGAGIGGGNDEREQTLNQLLTEMDGFEGNTGIIIIAATNRPDVLDSALMRPGRFDRQVMVDAPDYSGRKEILEVHARNKKLAPEVSIDSIARRTPGFSGADLANLLNEAAILTARRRKSAITLLEIDDAVDRVVAGMEGTPLVDSKSKRLIAYHEVGHAIVGTLLKDHDPVQKVTLIPRGQAQGLTWFTPNEEQGLTTKAQLMARIAGAMGGRAAEEEVFGDDEVTTGAGGDLQQVTEMARQMVTRFGMSNLGPISLESSGGEVFLGGGLMNRSEYSEEVATRIDAQVRQLAEQGHQMARKIVQEQREVVDRLVDLLIEKETIDGEEFRQIVAEYAEVPVKEQLIPQL

SEQ ID NO: 23048 - protein, 665 aa, Synechocystis sp. PCC 6803
MSHRPRSDRHSFSSPSRFWHRLGMGLLVAGTLALPVSTLAQEGGEGAQPKASPSPIQSPNSSNGEATPRSFFNSGSPRSAEPKMNYGQLIDAIKANQVAKVEVDTNRRQAIVTLKDAPPGSKPQTVQLLDNNPELLNLLRSRSETIDLDINRTPDNSALYGLLTNLLVVAILIGLVVMVVRRSANASGQAMSFGKSKARFQMEAKTGVGFDDVAGIDEAKEELQEVVTFLKQPEKFTAIGAKIPRGVLLIGPPGTGKTLLAKAIAGEAGVPFFSISGSEFVEMFVGVGASRVRDLFKKAKENAPCLVFIDEIDAVGRQRGVGYGGGNDEREQTLNQLLTEMDGFEGNSGIIVIAATNRPDVLDLALLRPGRFDRQVTVDYPDVQGRELILAIHAQNKKLHEEVQLAAIARRTPGFTGADLANVLNEAAIFTARRRKEAITMAEVNDAIDRVVAGMEGTPLVDSKSKRLIAYHEVGHALIGTLCPGHDPVEKVTLIPRGQAQGLTWFTPDEDQSLMTRNQMIARIAGLLGGRVAEEVIFGDDEVTTGAGNDIEKITYLARQMVTKLGMSSLGLVALEEEGDRNFSGGDWGKRSEYSEDIAARIDREIQAIVTAAHQRATRIIEENRNLMDLLVDALIDQETIEGEHFRQLVESYQQSQKQPALAGK

SEQ ID NO: 23049 - protein, 910 aa, Chlamydophila pneumoniae CWL029
MSKDKKMKPEPKKNFPTVFFFLLFGVVFGVVAFQNFLAGKKARVGFSHQIEHLVNLRLIVPEDSHKIALNDNLVSFGGRFRDVQTQEGQLRYHYLELIDQGHRLDLDLQETSKSLTTLGKEVTNSILWFSAISGSPIPEQGYAISYPSEVSGSVLTEPLVVTGPATPQLINLHSLQERYPTLSRSPEALRTYGSDLYELIGKYLSPVLGIGSETLKRELKDLYQQVEVSLTQETDTEAAYTLYGQVLSTLNRISSSLVVSEGGERFSQLRSVRLYREEWNKYHKLVEARDLNQAQLEKLRGELSQTVWYFNNQELSSRSLEKQDPEVFGHWFAGAKEEWTAFKFNHSLSFKAPDQPRNLVLEKTFKSQEPSPHYLGYLFTFLPIILVLLFVYLVFSRQMRGMSGSAMSFGKSPARMLLKGQNKVTFADVAGIEEAKEELIEIVDFLKNPNKFTSLGGRIPKGVLLIGPPGTGKTLIAKAVSGEADRPFFSIAGSDFVEMFVGVGASRIRDMFEQAKRNAPCIIFIDEIDAVGRHRGAGIGGGHDEREQTLNQLLVEMDGFGTNEGVILMAATNRPDVLDKALLRPGRFDRRVVMNLPDIKGRFEILMVHAKRIKLDPTVDLMAVARSTPGASGADLENLLNEAALLAARKDRTAVTAVDVAEARDKVLYGKERRSLEMDAEERKTTAYHESGHAVVGLCVQHGDPVDKVTIIPRGLSLGATHFLPEKNKLSYWKKELYDQLAVLMGGRAAEEIFLGDISSGAQQDISQATKLVRSMVCEWGMSPQLGNVTYDERSDGLTGYGGYHEKSYSEETAKTIDTELRMLLDAAYQRALDIINEHKAEIELMTQMLIEFETLDSKDVKEIMDHTWDPEKKRARLKEEGMLFKKSSDDLPPPPPKEDTLPGLGFNAT

SEQ ID NO: 23050 - protein, 611 aa, Thermoanaerobacter tengcongensis
MKDNNKIFRSMVLYLLIFIAIYAMVQLYSQATPQVTKIDYGELVRYISANQIKSITLSGNQVKGVFKNGTEFESSVPDITNFMSFVDPYILEGKLDFKYEPQVGPPWWVQMLPSLFLVGVLILFWYIFMQQAQGGGGSRVMSFGKSRARMVTDKDKRVTFNDVAGADEEKEELQEIVEFLKYPKKFIELGARIPKGVLLVGPPGTGKTLLARAVAGEAGVPFFSISGSDFVEMFVGVGAARVRDLFEQAKKNAPCIVFIDEIDAVGRQRGAGLGGGHDEREQTLNQLLVEMDGFSVNEGIIVIAATNRPDILDPALLRPGRFDRHIVVNIPDIKGREEILKVHARNKPLAPDVSLQVIARRTPGFTGADLENVMNEAALLAARKGLKQITMAELEEAITRVVAGPEKRSRIMSEKDKKLVAYHEAGHAVVAKLLPTTPPVHEVTIIPRGRAGGYTMLLPEEDKYYMSKSEMMDEIVHLLGGRAAEKLVLNDISTGAQNDIERATNIARKMVTEYGMSDRLGPMTFGTKSEEVFLGRDLGRTRNYSEEVAAEIDREIRRIIEEAYKRAESLLQENIDKLHRVAKALMEKEKLNGEEFEKVFNGEEIEGVSFA

SEQ ID NO: 23051 - protein, 510 aa, Thermoanaerobacter tengcongensis
MKKNLHTIILVMSIFVNILLLYLFITEVNPNLSLNLTFLLIAAATAIAYILLKNKFSELMPVKYNSLSEINEEVTKKKGNITFKDVAGLDEVIEELKVIIDFMTNTEKYNKMGAKIPKGILFYGPPGTGKTLLATALAGETNSTFISASGSEFVEKYVGVGASRIRALFAKAKKNAPSIIFIDEIDAVGTKRNTDNNSEKDQTLNQLLVEMDGFNSNEGIIVIGATNRIDMLDEALLRPGRFDRTIHIGPPNLKGRLEILKVHTRNKPLDESVSLVDLARKTHGMTGAHLATMCNEAAILAVMRNKTKIGKEEFEEALERVIAGLKKKNPSGLEKERTIAAYHEAGHALIGKILNVNVIEKISIVPRGEALGYVLNFPKDDSFLLTKTELKNKITMLLGGRASEEIIFNEISTGAENDLKEATKIAYQMVCNFGMSELGNRVFDLHLVKSTEMIDKEVDKIINSCYTFARKILLEHKDKVIAIAEKLLEKETITKEELEEIIEEKTSMCV

SEQ ID NO: 23052 - protein, 492 aa, Thermoanaerobacter tengcongensis
MVREILLGIAIAFTIFAAFLGINVMPIVFLMAAFLLLSHLIENRGLVPANKNIVNPESEVSFEDIGGQNTAISELKEALDFVVNREKIAQMGIRPIKGILLIGPPGTGKTLLAKAAAKYTNSSFIATSGSEFIEMYAGVGAQRVRHLFETAKSLAKKEGKNSAIIFIDEIDILGAKRGTHESHHEYDQTLNQLLVEMDGIKNNGDVNILVIAATNRPDLLDPALLRPGRFDRQVVVDLPDKNGRLQILKIHTKNKPLGEDVNLEEIAESTFGFSGAHLENLCNEAAILALRDGSPSILQKHFKEAIDKVILGEKSDRKPTEEELYRIAVHEAGHAIVGEEVNPGSVAVITIVPRGRALGFVRQAEKKDLLIYTKEQLEKDIMVALGGTVAEVLVLGGRSTGSANDFEQAVDIAKKIVFTGLSDLGIVSKEDISKEKVNEEVNKIVKNLEDKVKEILERRLEKLKEVAELLKKEEAISGEKLREILNKEEVLA

SEQ ID NO: 23053 - protein, 217 aa, Paracoccidioides brasiliensis
PRAVSVRAVSSARPSTSDPRYASGRLTRCHRLAPDRDGRQAILRIHTRDMPLAPDVDLPQVARMTPGMTGAELANLANESALLAVKRQQQQVAQHDFLEGLEKVQLGAARSLLMPEEERRRTGYHESGHALLGMLQPGADPVRKVTIVPRGRALGVTLSTPEADRYAYTEEYLRARIIGALGGMAAEHVVFGVVTTGSENDLEQVTGIARGMSPAGA

SEQ ID NO: 23054 - protein, 679 aa, Bacillus firmus
MNRIFRNTIFYLLIFLVIVGIVSVFNSDQTETENVSFNEFAERLENGQVQELSVKPERQVYLVRGQFNDQAEDEFFQTYALRSEQTAELLFNAEDPTGTPFNLEIEPADETSGWVQFFTGIIPFIIIFILFFFLLSQAQGGGSRVMNFGKSKAKMVNEDKKKAKFKDVAGADEEKQELVEVVEFLKDPRKFSAIGARIPKGVLLVGPPGTGKTLLARAVAGEAGVPFFSISGSDFVEMFVGVGASRVRDLFENAKKNAPCIIFIDEIDAVGRQRGAGLGGGHDEREQTLNQLLVEMDGFSANEGIIIIAATNRADILDPALLRPGRFDRQIQVNRPDVNGREEVLKVHARNKPLNDDVNLKTIATRTPGFSGADLENLLNEAALVAARHDHTKISMIHIEEAIDRVIAGPAKKSRVISPKEKKIVAWHEAGHTVVGVKLENADMVHKVTIVPRGMAGGYAVMLPKEDRYFMTQPELLDKIIGLLGGRVAEEVTFGEVSTGAHNDFQRATGIARKMVTEYGMSEKLGPMQFISGSGGQVFLGRDIQNEQNYSDAIAHEIDLEVQRIIKECYARCKQILLENKDSLDLVAKTLLDMETLDAEQIKSLVHEGKLPDDHHLNAHPEKEKASESDVKVNINSKKEETPQVEAEQPQEPNTDEPIEKDPSVEDNRSFEDDTNKKE

SEQ ID NO: 23055 - protein, 656 aa, Magnetococcus sp. MC-1
MVMLFNLFNSPQGPGQSITFSDFSEMVAQGKVTAVTLEGRTVRGLSTDGSPFSSRVPDNYDLTKDLLAHGVDIDVREPEGTPMLMQILISWFPMLLLIAVWIYFMRQMQSGGGRGAMSFGKSKAKLMSDKAAKVTFQDVAGIEEAKEELQEVVQFLKDPHKFQRLGGKIPKGVLLVGPPGTGKTLLARAIAGEANVPFFNLSGSDFVEMFVGVGAARVRDMFEQGKKNAPCIIFIDEIDAVGRHRGAGLGGGHDEREQTLNQLLVEMDGFESTEGVIMVAATNRPDVLDPALLRPGRFDRQVTVPNPDILGRTQILKVHMNKVPLSDSVDAEVIARATPGFSGADLANLVNEAALIAAQLDKRVVEMEDFENAKDKVMMGKPRRSAVISEKERKTTAYHEAGHAVVAMALDGADPVHKVTIIPRGRALGLTMQLPLEDRYTYSKVQLEQNIAILMGGRLAEELVLNQLTTGAGNDIQRATDLARKMICSYGMSDTLGPLTYGENEQEIFLGREITQHKSVSEETARRIDAEVFDIVDRNYKRAKQILTDKMEVLHTMAQALLERETIDADEVIKLMAGEPAETALKPLKKKDERANKPTPTVADDGEQGDQTAKDAVAGSVTQAEDDVEGSTRTATEASTQEVVSKDTPEGDDKDR

SEQ ID NO: 23056 - protein, 708 aa, Lactobacillus gasseri
MKNRRNRLLSNGLFYIIVFVILLAGINWAVGGSGSNGSTENIRYSQLVKDLKAGKVKSINVQPSNGVYTVTGSYKKAQKSKNQNNTGFGLIPSSQSSSEVTRFSTTMLQNDSMVKTVSDLAQKSGASISGQGESQSGTWISTIVMLVPTLIFIVMLWMMMNQGGQGRGGGMMNFGKSHVKPQDPSKNKVRFSDVAGEEEEKQELVEIVEFLKNPAKYTKLGARIPAGVLLEGPPGTGKTLLARAVAGEAGVPFYSISGSDFVEMFVGVGASRVRDLFETAKKNAPSIIFIDEIDAVGRKRGNGVSGGHDEREQTLNQLLVEMDGFEGDEGVIVMAATNRSDVLDPALLRPGRFDRKVLVGRPDVKGREAILKVHAKNKPLAPDVDLKEVARQTPGFVGADLENVLNEAALVAARRNKTEITASDIDEAEDRVIAGPAKKDTVISPEERKRVAYHEAGHAIVGLVLSDSRTVRKVTIVPRGRAGGYNIMLPKEDENIITKKQLMEQVAGLMGGRAGEEVVVGDKSTGASNDFEQATNIARGMVTQYGMTDVGMTELESPSMQVPYGTKPYSEATAAKIDEAVKEILDEGHKQAVDIIKSHRETHKIIAEALLKYETLNEKQILSLFKTGKMPENDENEFPSESKASTYEEAKAAMEKKDQQREETENKDDKEDVHPLPDDHKNIDDIPLNPPSEKKNSDEHNSDENKDK

SEQ ID NO: 23057 - protein, 687 aa, Listeria monocytogenes
MNRFFRNAIFYVIIFLVIIGIVASFNSNKEAAKDISYSEFVSKLEDGKVKSVEIQPDRSVYTINGEFKSSDKSSDDKKTGLGQSKTSSTAFTTYALNSDTSLGDLQKTLDKEDVKTTIVPAKQNSGWVTFLTSIVPFVIIFILFFFLMSQSQGGGGGKVMSFGKSKAKLYNDDKKKVRFTDVAGADEEKQELVEVVEFLKDPRKFADLGARIPKGVLLVGPPGTGKTLLARAVAGEAGVPFFSISGSDFVEMFVGVGASRVRDLFENAKKNAPCIIFIDEIDAVGRQRGAGMGGGHDEREQTLNQLLVEMDGFGGNEGIIIIAATNRADVLDPALLRPGRFDRQIMVDRPDVKGREAVLRVHARNKPLAKSVDLKAIAQRTPGFSGADLENLLNEAALVAARSDKKEIDMSDLDEASDRVIAGPAKKNRVISEKERRTVAYHEGGHVIVGMVLDEAEVVHKVTIVPRGQAGGYAVMLPKEDRFLMTKAELMDRITGLLGGRVAEEVTFGEVTTGASNDFERATELARRMVTEWGMSDKIGPLQFTSGNGQVFMGRDFGSDKGYSDKIAYEIDTEVQSLIRYCYDRAKTIITEHQEQHKLIAETLLKVETLDARQIRSLFDDGVMPPDIDTIDVEAEYPSEKDEEVAGKSFEEEKEELKEEEKIEEPKEVTSEDAPNIEQTPNDKKDE

SEQ ID NO: 23058 - protein, 690 aa, Listeria innocua
MNRFFRNAIFYVIIFLVIIGIVASFNSNKEAAKDISYSEFVSKLEDGKVKSVEIQPDRSVYTIEGEFKSSDKSSDDKKTGLGQSKTSSTAFTTYALNSDTSLGDLQKTLDKEDVKTTVVPAKQNSGWVTFLTSIVPFVIIFILFFFLMSQSQGGGGGKVMSFGKSKAKLYNDDKKKVRFTDVAGADEEKQELVEVVEFLKDPRKFADLGARIPKGVLLVGPPGTGKTLLARAVAGEAGVPFFSISGSDFVEMFVGVGASRVRDLFENAKKNAPCIIFIDEIDAVGRQRGAGMGGGHDEREQTLNQLLVEMDGFGGNEGIIIIAATNRADVLDPALLRPGRFDRQIMVDRPDVKGREAVLRVHARNKPLAKSVDLKAIAQRTPGFSGADLENLLNEAALVAARSDKKEIDMSDLDEASDRVIAGPAKKNRVISEKERRTVAYHEGGHVIVGMVLDEAEVVHKVTIVPRGQAGGYAVMLPKEDRFLMTKAELMDRITGLLGGRVAEEVTFGEVTTGASNDFERATELARRMVTEWGMSDKIGPLQFTSGNGQVFMGRDFGSDKGYSDKIAYEIDTEVQSLIRYCYDRAKTIITEHQEQHKLIAETLLKVETLDARQIRSLFDDGVMPPDIDTIDVEAEYPSEKDEEVAGKSFEEEKEDLKEEKVEETQDEPKEVTSEDAPNIEQTPNDKKDE

SEQ ID NO: 23059 - protein, 691 aa, Listeria monocytogenes EGD-e
MNRFFRNAIFYVIIFLVIIGIVASFNSNKEAAKDISYSEFVSKLEDGKVKSVEIQPDRSVYTINGEFKSSDKSSDDKKTGLGQSKTSSTAFTTYALNSDTSLGDLQKTLDKEDVKMNVVPAKQNSGWVTFLTSIVPFVIIFILFFFLMSQSQGGGGGKVMSFGKSKAKLYNDDKKKVRFTDVAGADEEKQELVEVVEFLKDPRKFAELGARIPKGVLLVGPPGTGKTLLARAVAGEAGVPFFSISGSDFVEMFVGVGASRVRDLFENAKKNAPCIIFIDEIDAVGRQRGAGMGGGHDEREQTLNQLLVEMDGFGGNEGIIIIAATNRADVLDPALLRPGRFDRQIMVDRPDVKGREAVLRVHARNKPLAKSVDLKAIAQRTPGFSGADLENLLNEAALVAARSDKKEIDMSDLDEASDRVIAGPAKKNRVISEKERRTVAYHEGGHVIVGMVLDEAEVVHKVTIVPRGQAGGYAVMLPKEDRFLMTKAELMDRITGLLGGRVAEEVTFGEVTTGASNDFERATELARRMVTEWGMSDKIGPLQFTSGNGQVFMGRDFGSDKGYSDKIAYEIDTEVQSLIRYCYDRAKTIITEHQEQHKLIAETLLKVETLDARQIRSLFDDGVMPPDIDTIDVEAEYPSEKDEEVAGKSFEEEREELKEEEKVEETQEEPKEVTSEDAPNIEQTPNDKKDE

SEQ ID NO: 23060 - protein, 769 aa, Mycobacterium smegmatis
  unsure (1)..(769): unsure at all Xaa locations
MNRKNVIRTLTVIGVVLLLGWSFFYFSDETRGYKPVDTTVALAQIRGDNVNSAQIDNREQQVRLDLKSGNGNTENSDKIITKYPTGYGLTLFNALQDKGAKTNTVVNQGSVFGTLLIYMLPLLMLVALFVMFSRMQTGGRMGFGFGKSRAKQLSKDMPKTTFADVAGVDEAVEELYEIKDFLQNPSRYQALGAKIPKGVLLYGPPGTGKTLLARAVAGEAGVPFFTISGSDFVEMFVGVGASRVRDLFEQAKQNSPCIIFVDEIDAVGRQRGAGLGGGHDEREQTLNQLLVEMDGFGDRQGVILIAATNRPDILDPALLRPGRFDRQIPVSNPDLAGRRAVLKVHSQGKPIAPDADLDGLAKRTVGMSGADLANVINEAALLTARENGTVITGPALEEAVDRVVGGPRRKSRIISEHEKKITAYHEGGHTLAAWAMPDIEPIYKVTILARGRTGGHAVAVPEDDKGLMTRSEMIARLVFAMGGRAAEELVFREPTTGAVSDRTGTKIARAMVTEYGMSSKLGAVRYGTEHGDPFLGRTMGTQADYSHEVAQIIDDEVRKLIEAAHTEAWEILTEYRDVLDILAGELLEKETLHRAELEAIFGDVEKRPRLTMFDDFGGRVPSDKPPIKTPGELAMERGEPWPPPVPEPAFKAAIAAANRXARSATAPTARPATAPRLRQGPTQPDYGAPAGWHAPGWPPPQQSQQPGYQPQQGYWYPPPHPSGWQQPQPYPYQPYPHPGQQGTSPEHGRPSEQSGQDDGHTGDRSNPHG

SEQ ID NO: 23061 - protein, 121 aa, Mycobacterium tuberculosis
GPPGTGKTLLARAVAGEAGVPFFTISGSDFVEMFVGVGASRVRDLFEQAKQNSPCIIFVDEIDAVGRQRGAGLGGGHDEREQTLNQLLVEMDGFGDRAGVILIAATNRPDILDPALLRPGR

SEQ ID NO: 23062 - protein, 648 aa, Agrobacterium tumefaciens str. C58 (U. Washington)
MNPNFRNFALWAVIALLLIALFSMFQTSPTQTGSREIPYSQFIRDVDSGRVRDVTVTGNRVLGTYTENGTAFQTYSPVIDDSLMERLQSKNVTIVARPESDGSSGFLSYLGTLLPMFLILGVWLFFMRQMQGGSRGAMGFGKSKAKLLTEAHGRVTFDDVAGVDEAKQDLEEIVEFLRDPQKFQRLGGKIPRGVLLVGPPGTGKTLLARSVAGEANVPFFTISGSDFVEMFVGVGASRVRDMFEQAKKNAPCIIFIDEIDAVGRHRGAGLGGGNDEREQTLNQLLVEMDGFEANEGIILIAATNRPDVLDPALLRPGRFDRQVVVPNPDIVGRERILKVHVRNVPLAPNVDLKILARGTPGFSGADLMNLVNEAALMAARRNKRVVTMQEFEDAKDKIMMGAERRSSAMTEAEKKLTAYHEAGHAITALKVAVADPLHKATIIPRGRALGMVMQLPEGDRYSMSYKWMVSRLVIMMGGRVAEELTFGKENITSGASSDIEQATKLARAMVTQWGFSDALGQVAYGENQQEVFLGHSVSQSKNVSEATAQTIDTEVRRLIDEAYTEARRILTDNHDGFVAIAEGLLEYETLTGEEIKALLRGEKPARDLGDDSPGSRGSAVPKAGAKKDGPSEAKGDGEAEGGMEPQPH

SEQ ID NO: 23063 - protein, 662 aa, Agrobacterium tumefaciens str. C58 (Cereon)
MAGSRYVRVSSGSSMNPNFRNFALWAVIALLLIALFSMFQTSPTQTGSREIPYSQFIRDVDSGRVRDVTVTGNRVLGTYTENGTAFQTYSPVIDDSLMERLQSKNVTIVARPESDGSSGFLSYLGTLLPMFLILGVWLFFMRQMQGGSRGAMGFGKSKAKLLTEAHGRVTFDDVAGVDEAKQDLEEIVEFLRDPQKFQRLGGKIPRGVLLVGPPGTGKTLLARSVAGEANVPFFTISGSDFVEMFVGVGASRVRDMFEQAKKNAPCIIFIDEIDAVGRHRGAGLGGGNDEREQTLNQLLVEMDGFEANEGIILIAATNRPDVLDPALLRPGRFDRQVVVPNPDIVGRERILKVHVRNVPLAPNVDLKILARGTPGFSGADLMNLVNEAALMAARRNKRVVTMQEFEDAKDKIMMGAERRSSAMTEAEKKLTAYHEAGHAITALKVAVADPLHKATIIPRGRALGMVMQLPEGDRYSMSYKWMVSRLVIMMGGRVAEELTFGKENITSGASSDIEQATKLARAMVTQWGFSDALGQVAYGENQQEVFLGHSVSQSKNVSEATAQTIDTEVRRLIDEAYTEARRILTDNHDGFVAIAEGLLEYETLTGEEIKALLRGEKPARDLGDDSPGSRGSAVPKAGAKKDGPSEAKGDGEAEGGMEPQPH

SEQ ID NO: 23064 - protein, 625 aa, Magnetospirillum magnetotacticum
MLLVMLFNLFQASSPPRGPGQTSYSEFLSDVDRGSIADVTIQGSVVNGHFTDGRPFTTYMPQDVNVVDKLRAHNVRITAVPPSDDAPTLWSVLVSWFPMLLLIGVWVFFMRQMQGGGGKAMGFGKSRARLLTEKTGRVTFEDVAGIDEAKQELEEIVEFLKDPQKFQRLGGKIPKGCLLVGPPGTGKTLLARAIAGEANVPFFTISGSDFVEMFVGVGASRVRDMFEQGKKNAPCIIFIDEIDAVGRHRGAGLGGGNDEREQTLNQLLVEMDGFESNEGVILIAATNRPDVLDPALLRPGRFDRQVTVPNPDILGREKIIKVHMRKVPLSPDVDARIIARGTPGFSGADLANLVNEAALLAARAGKRVVTMAEFEAAKDKVMMGAERRSMVMSEDEKKLTAYHEAGHALVMMHVPGHEPLHKVTIIPRGRALGLTMSLPERDRYSLSLKQIKAMIAAFFGGRVAEEMIFGLDAVTTGASNDIQRATDLSRKLVTEFGFSEKLGPLRYNDNQEEIFLGHSVTQHKNVSEATASLIDSEVRRFVEEGENTARDILAKYRAELEIIAKGLLELETLSRDDIDALIRGETITRGDSGDYRPKDPPRRSSVPSSGPGGRPGYDPEPQPGA

SEQ ID NO: 23065 - protein, 542 aa, Magnetospirillum magnetotacticum
SSPQRRRPGRCWRNSRRGNRRSNTKSCRICRQTKGASCWRCSSGSGRGFYARGGRIGMERKTEYNIWYWVVAFIAVLFIQNLIAGWQSVAPISYSQFEKYLADGKISSVAVGADTITGTFAEPVDGKKQFVTTVVNPAILERIDRSGIEITGVPQNTFLGTLISWVAPALVFFGIWMLLFRKFADKQGFGGFMQVGRSKAKVYMEKETGVSFADVAGVDEAKAELEEVVEFLRNPAEYGKLGAHIPKGILLVGPPGTGKTLLARAVAGEAGVTFFSISGSEFVEMFVGVGAARVRDLFEQARKSAPAIIFIDELDALGRARSSGQIAGGHDEREQTLNQLLTELDGFDPSVGIVLLAATNRPEILDPALLRAGRFDRQVLVDRPDKKGRVQILGVHMKKVKLAPDVDAEKVAALTPGFSGADLANLVNEAALLATRRKADAVTMDDFNNAVERIIAGLEKKNRVLNPREREIVAHHEMGHALVAMALPGLDPVHKVSIIPRGIGALGYTIQRPTEDRFLMTREELENKIAVLLGGRAAEKIM

SEQ ID NO: 23066 - protein, 304 aa, Magnetospirillum magnetotacticum
VSPAPPSATRRSSAVLAAGDPVLSGPDLPVAPDPSGAGRAMASASSKSKLINEAHGRVSFEDVAGVEEAKEDLQEIVEFLRDPQKFQRLGGRIPRGVLLVGPPGTGKTLIARAVAGEANVPFFTISGSDFVEMFVGVGASRVRDMFEQAKKNAPCIIFIDEIDAVGRHRGAGLGGGNDEREQTLNQLLVEMDGFEANEGVIIIAATNRPDVLDPALLRPGRFDRQIMVPNPDVTGRERILRVHVRKVPLAPDVDLKTIARGTPGFSGADLMNLVNESACSPPVAASGSSRCTSSRRTERGGPRL

SEQ ID NO: 23067 - protein, 220 aa, Magnetospirillum magnetotacticum
FLSDSEKFQAVGAKIPKGVLLYGPPGTGKTLLARAVAGEAGVPFYSISGSDFVEMFVGVGASRVRDLFNQAKENSPAIIFVDEIDAVGRHRGAGMGGGHDEREQTLNQLLVEMDGFDVKTNVILIAATNRPDILDPALLRPGRFDRQIAVEAPDLKGREAILRVHAAGKPIVPEIDLAAVARRTPGFTGADLANVLNEAALLTARSGAQLIDDRRSRRDR

SEQ ID NO: 23068 - protein, 655 aa, Leptospira interrogans serovar lai str. 56601
MNKNLKNVFFVLIIMMVVLIIAYNYENNAGATKDISYSDFLNMLEPVEGKKPLGKLYKGNVDKYNKIQIEKDVIEGYYIPSEYADSKTAKPVKFRTTVAPLDKDLISSLRRANVSFDARSAEEGKFWSVIGSNILLIVILIGLFWFIMMRQIQSTGNKAFSFGKSKAKMTMDPKVKVTFEDVAGCEEAKEELVEIIEFLKDPKKFHAIGARIPTGVLLVGPPGTGKTLLARAVAGEAGVPFFSISGSDFVEMFVGVGASRVRDLFDQGKKNSPCIIFIDEIDAVGRLRGAGLGGGHDEREQTLNQMLVEMDGFEKNEGVIVMAATNRADVLDPALLRPGRFDRQVMVDLPDIKGREEILKVHSRKVPMTSDISLHSIARGTPGFTGADLANLINEGALLAARKNKKRVTQEELEEARDKVMMGPERKSFFISEKEKEVIAYHEAGHAILGTLLPYTEPVHKVTIIPRGRALGLTQSLPKEDKHILPKTYWLDQIVVAMGGFIAEEFKFGVTSTGSSNDIQQASNIARKMVCEWGMSEKLGTVNYSGDQANVFIGRDMGHSSKYYSEEFAAMIDKEVREIIQTCLNKGRDLVRKNASKFEGLAKALLAKETISHDELMTIVHPANEEGTKKKPEKTVKSKKQNGIKTNPAYNAGME

SEQ ID NO: 23069 - protein, 714 aa, Fusobacterium nucleatum subsp. nucleatum ATCC 25586
MNDNQFENEDLKNKDDSDVHEKQENKENEKEEPKQEKSQEQDSHNENKNDSEDKKSSDEDKKQDDKYNPFNNKRDDEKRRVVGKAVKVNFNFKGLLMLIFIITLAVVVPSIMDENKNQQIVDISYSDFIKNIENKKIGVVEEKDGYVYGYKASEVKYLETKSNSIKSKLGFDGKNEVQGLKARLITNRLGEDSNLMAVINNNNAIIQSVEPPEPSLFLSIVLAFLPYIIMIGFLVFMLNRMNRGGSGGGPQIFNMGKSRAKENGENISNVTFADVAGIDEAKQELKEVVDFLKEPEKFRKIGAKIPKGVLLLGEPGTGKTLLAKAVAGEAKVPFFSMSGSEFVEMFVGVGASRVRDLFNKARKNAPCIVFIDEIDAVGRKRGTGQGGGNDEREQTLNQLLVEMDGFGTDETIIVLAATNRADVLDKALRRPGRFDRQVVVDMPDVKGREEILKVHAKGKKFAPDVDFKIIAKKTAGMAGADLANILNEGAILAARAGRTEITMADLEEASEKVQMGPERKSKVVPEDEKKMVAYHEVGHGIVGYIIGGGDRVHKITMIPRGPAGGYTLSLPEEEKSFHSKKYMLDRIARYFGGRAAEEIIFGKENITDGAGSDIYYATLIAKDIVTKYGMTEKFGPVFLEATEEDYMLQRKYYSEQTGKEVDDEIRKIITEQYSRAKNILLENREKLEEVTTILLEKETIMGPEFEAIMRGENI

SEQ ID NO: 23070 - protein, 633 aa, Bacillus anthracis str. A2012
MNRIFRNTIFYLLIFLVVIGIVSYFNGSTQKTTSVSYDKFITKLEKGEVRNVQLQPKNGVFEVKGQFNNSSQGEQFVTYAPNTEELQKKINDKAQGAEVKYQPAEETSAWVTFFTSIIPFVIIFILFFFLLNQAQGGGSRVMNFGKSKAKLYNDEKKKVRFRDVAGADEEKQELVEVVEFLKDPRKFAEVGARIPKGVLLVGPPGTGKTLLARAVAGEAGVPFFSISGSDFVEMFVGVGASRVRDLFENAKKNAPCIIFIDEIDAVGRQRGAGLGGGHDEREQTLNQLLVEMDGFGANEGIIIIAATNRPDILDPALLRPGRFDRQITVDRPDVNGREAVLKVHARNKPLDENINLRAIATRTPGFSGADLENLLNEAALVAARQDKKKIDMSDIDEATDRVIAGPAKKSRVISEKERNIVAFHEAGHTVIGVVLDEADVVHKVTIVPRGQAGGYAVMLPKEDRYFMTKPELLDKITGLLGGRVAEEIVFGEVSTGAHNDFQRATGIARRMVTEFGMSDKLGPMQFGSSQGGQVFLGRDFHSEQNYSDAIAHEIDMEMQTIMKECYARAKQILTDNRDKLDLIAKTLLEVETLDAEQINHLCDYGRLPERPTSSADVKVNINMKKDDEESEDK

SEQ ID NO: 23071 - protein, 717 aa, Clostridium perfringens str. 13
MFKDKKMLKYIVIYSIIAFGILLTFNMVKDEMLYEKVDYSTFMQMLDKKEVKSVNFSGNQIEITPSDSSNLKGKILYTTNPAVAGITQPDLIKDLTAAGVGFNVTKPENYQLLGLLMSWVFPLILIFFVGRMMFSKMNNKMGGGVMSFGKNNAKLYAENETGITFKDVAGQDEAKESLVEIVDFLHDTRKYVEIGAKLPKGALLVGPPGTGKTLLAKAVAGEAKVPFFSMSGSDFVEMFVGMGAARVRDLFKQAEEKAPCIVFIDEIDAIGKSRDGAIQGNDEREQTLNQLLTEMDGFDSSKGVVILAATNRPEVLDKALLRPGRFDRRIIVDRPDLIGREEILKVHSRDVKLSDDVSLEEIAKSTPGAVGADLANIVNEAALRAVKHGRKFVIQEDLDEAVEVIIAGQEKRDRILSPKEKKIVAYHEVGHALVAALLNNTDPVHKITIVPRTMGALGYTMQLPEEEKYLVSKEEMIDQISVMLGGRAAEEVVFNSITTGASNDIERATQSARNMITIYGMSERFDMMALEAMSNRYLDGRPVRNCSETTAAIADEEVLQVIKKAHEKSIKILIENRELLDEITGVLLDKETIMGDEFMEIVYSKYPEKREADEKAKKEIQSLREQALAKRKEKEEAIKKAREEALRLEEEQRKQAELKAMIEAQEEAAKLARANNEANNDDLDSSKENEEVKSNVNDRATEEKKDDSSTNNKVDGE

SEQ ID NO: 23072 - protein, 631 aa, Thermosynechococcus elongatus BP-1
MKVSWKTVLLWSIPLLLIGILLWQGVSNFMLNQSQPPLNTASTRMSYGRFLSYLDAGRISKVDIFDNGRTAIVDVSDPELINGRPLRVRVDMPGTAPEVISKLREQHVEIDVHPARNDGALWGLLGNLLFPILLLGGLFFLFRRSSNVPGGPGQAINFGKSRARFQMEAKTGVMFDDVAGVDEAKEELQEVVTFLKKPEKFTAVGARIPKGVLLVGPPGTGKTMLAKAIAGEAGVPFFSISGSEFVEMFVGVGASRVRDLFRKAKENAPCLIFIDEIDAVGRQRGAGIGGGNDEREQTLNQLLTEMDGFEGNTGIIVIAATNRPDVLDAALLRPGRFDRQVIVDAPDIKGRLAILKVHARNKKLAPEVSLEAIARRTPGFTGADLANLLNEAAILTARRRKPAITMLEIDDAVDRVVAGMEGTPLIDGKSKRLIAYHEVGHAIVGTLLKDHDPVQKVTLVPRGQARGLTWFMPSEDSGLISRSQLMARMAGALGGRAAEYVVFGDAEVTTGAGNDLQQVTAMARQMVTRFGMSDLGPLSLETQNGEVFLGRDLVSRTEYSEEIAARIDAQVRELVQHSYELAIKIIRENRVVIDRLVDLLVEKETIDGEEFRQIVAEYTVVPDKERFVPQL

SEQ ID NO: 23073 - protein, 734 aa, Oenococcus oeni MCW
MKNKNRGFFRSSLSYAFVILAVIFLIYSFFGRSDGSVKYLSTTTFLKELKNNKIKDFTIQPGDSGVYTIAGDFKKAQKSSSSSSSTTTLLSGYQSSVTKFTAYVLPNNSSLKQITTAAQKAGVAVNPKPAASNFWGSMLTMILPTLIMFALLYWMLIGSQRGQGGSGGPGGIMSFGRSKAKPADPKQNKIRFADVAGEEEEKQELVEVVEFLKDPKKFTKLGARIPKGVLLEGPPGTGKTLLAKAVAGEAKTPFFSISGSDFVEMFVGVGASRVRDLFENAKKSAPSIIFIDEIDAVGRRRGAGMGGGNDEREQTLNQILIEMDGFEGSEGVIVLASTNRSDVLDPALLRSGRFDRKILVGAPDVKGREAILRVHAKNKPLAADVDLKVIAQQTPGFVGADLENLLNEAALLAARNDEKAVTAADIDEAEDRVIAGPAKKDRKTTQDERETVAYHEAGHAIVGLVLNDAQVVRKVTIVPRGRAGGYALMMPKDERYLMSEKDAKEELAGLMGGRAAEILINHVASSGASNDFQQATQIAREMVTQYGMSDKLGMVQLEGSSNVFVGDPNNPNPPYSQKTSELIDEEVRRLTNEAYKRAVDIIKSHPKQHKAIAEALLKYETLDEAQIRSLFETGEIPSDLVKDSQRPARPLSYEESKAALKKNGSVDNKEAEDEVKEDKDDKEDENDSKSGSDSTSKKKTTKKTSTTRRKSTTSSTKKKPTTKRTKKDDDNKEN

SEQ ID NO: 23074 - protein, 575 aa, Trichodesmium erythraeum IMS101
  unsure (1)..(575): unsure at all Xaa locations
MKISWRTIVLWTIPALVIGFFLWQGTFGQTQVNMGSNTASTRMSYGRFLDYLQADRVTSVDLYDNGRTAIVEAVDPELDNRVQRLRVDLPVNSPSLISRLREANINFDSHPPRNEGAVWGLLGNLIFPILLIVGLFFLFRRSSNVPGGPGQAMNFGKSKARFSMEAKTGVLFDDVAGVDEAKEELQEVVTFLKKPERFTAVGARIPKGVLLVGPPGTGKTLLAKAIAGEAGVPFFSISGSEFVEMFVGVGASRVRDLFKKAKENAPCIIFIDEIDAVGRQRGAGIGGGNDEREQTLNQLLTEMDGFEGNSGIIIIAATNRPDVLDSALLRPXXXXXXXXXXXXXXXXXSILDVHARDKKLSSEISLEAIARRTPGFTGADLANLLNEAAILTARRRKEAITMLEINDAVDRVVAGMEGTPLMDGKSKRLIAYHEVGHAIVGTLLKEHDPVQKVTLVPRGQARGLTWFMPNEDQGLISRSQILARITGALGGRAAEKVIFGDAEVTTGASNDLQQVTGMARQMVTRYGMSDLGLMSLETQQSEVFLGRDLMTRSEYSXXXXXXXXXXXXXXXXXPW

SEQ ID NO: 23075 - protein, 666 aa, Tropheryma whipplei str. Twist
MSKITKSPVLYIVLLVVGVWVAVNLFLTNAYQSIRTEEGLELIKSDSLVSVRIVDRDQRVDLELATPYKNHGTKVQFNYVSQRATEIVNAVNKAKIKDGFTDEVPAPSVWGSIISMLLPIAAIGLFLWFMAGPQAAGGRGIAQFSRMRSRLVSKEMPKVRFTDVAGADEAVEELQEIKDFLSDPDKYRKLGARIPKGVLLFGPPGTGKTLLARAVAGEAGVPFFSISGSDFVEMFVGVGASRVRDLFEQAKQNSPSIIFIDEIDAVGRRRGSGFGGGHDEREQTLNQLLVEMDGFDVKTNIILIAATNRSDVLDSALLRPGRFDRHVAIDAPNLQGRLKILQVHARTKPVSKSVDLEVLARKTPGFTGADLANVLNEAALLTARSNAQIIDDRALDEAVDRVMAGPQRRSRVMTDHEKLVTAYHEAGHALTAAAMRYSDPVTKVTILPRSRALGYTMVMPVQDRYSVTRNELLDKLAYAMGGRAAEELVFHDPTTGASNDIEKATSIARKMVTEFGLSKDLGAVKFGNAHNETLMGVGQMTARDYSEVTAERIDVQVRALIQNAHDEAWEVISNNRNLLDDLALNLLEKETLNQDEIAEIFKGVRKLPERHVWQSAPNREPSNKPPVKYSAMGPDSEVTAKSPKRTSNRRRLPSARRPRKDSETQE

SEQ ID NO: 23076 - protein, 644 aa, Brucella suis 1330
MNPNYRNFALWAIIALLLIALFNLFQSPGQRTNSREISYSQFIDDVSNGRVKSVTITGQRISGTLADNGSTFQTYSPGDTGLVSRLEDKGVAITARPESDGSSSLIGILLSWLPMILILGVWIFFMRQMQGGSRGAMGFGKSKAKLLTEAHGRVTFQDVAGVDEAKQDLEEIVEFLRDPQKFQRLGGKIPRGVLLVGPPGTGKTLLARSVAGEANVPFFTISGSDFVEMFVGVGASRVRDMFEQAKKNAPCIIFIDEIDAVGRHRGAGLGGGNDEREQTLNQLLVEMDGFEANESIILIAATNRPDVLDPALLRPGRFDRQVVVPNPDIVGREQILKVHVRNVPLAPNVDLKVVARGTPGFSGADLANLVNEAALMTARRNKRLVTMQEFEDSKDKIMMGAERRSAMTPEEKTNTAYHEAGHAIVALNVPKADPVHKATIIPRGRALGMVMQLPEGDRYSATYTWMVSRLAIMMGGRVAEELKFGKENITSGASSDIQQATKLARSMVTQWGYSDKLGRVAYGDNQEEVFLGHSVSRTQNISEETAQIIDAEVRRLIDEAYAEATRILTKKKKDWIALAEGLLEYETLTGDEINELIAGNKPSRDQGNDTPSRGSGVPKAGSSRKRKGSEPGGEPGMEPKPQPQ

SEQ ID NO: 23077 - protein, 418 aa, Mycoplasma hominis
SRGAGIGGGNDEREQTLNQLLVEMDGIKENSGILIMAATNRTDVLDPALLRPGRFDRTITVGLPDIKEREAILKLHANGKRIASNINFAMVARRTPGFSGAQLENVINEASLLSVRENTGVITIEQIDEAIDRVIAGPAKKSRTISEKENIAVAYHEAGHAVVGIKIKGGNKVQKITIIPRGKAGGYNLMMPDEEKYNRSKSELLAIITSFMGGRVAEAIIYGADNVSTGASDDIAKATNIARKMVTEWGLSDLGPIKYEEDSSNPFLGRDYMKNSSFSSKVGQEIDEQIRKIILTAEKKAHEIITENRQLLELIKDALIIKETIVAEEIEYIEKHMELPPEITNTKKELKNEYSEEDFNELFNEVAGQKQIQEDKYKATLNSELKKHNIEDNSSNNHSEDSNDTKNLDEDSNKKDNQ

SEQ ID NO: 23078 - protein, 673 aa, Fusobacterium nucleatum subsp. vincentii ATCC 49256
MNDNQFENEDLKDKDDSDGHEKEENKKEEPKQENQQEQDSQDKDKKSSDEDKKQDDKYNPFNNKNKRDEERRRVVGKAIKVNFNFKGLLMLIFIITLAVVVPNIMDENKNQQVVDVSYSDFIKNIENKKIGVVEEKDGYVYGYKASEVKYLETKSNSIKSKLGFDGKKEVQGLKARLITNRLGEDANLMAVINNNAAIIQSVDPPEPSLFLSIVLAFLPYIIMIGFLVFMLNRMNRGGSGGGPQIFNMGKSRAKENGENISNVTFADVAGIDEAKQELKEVVDFLKEPEKFRKIGAKIPKGVLLLGQPGTGKTLLAKAVAGEAKVPFFSMSGSEFVEMFVGVGASRVRDLFNKARKNAPCIVFIDEIDAVGRKRGTGQGGGNDEREQTLNQLLVEMDGFGTDETIIVLAATNRADVLDKALRRPGRFDRQVVVDMPDIKGREEILKVHAKGKKFAPDVDFKIIAKKTAGMAGADLANILNEGAILAARAGRTEITMADLEEASEKVQMGPEKKSKVVPEDEKKMVAYHEVGHGIVGYIIGGGDRVHKITMIPRGQAGGYTLSLPEEEKSFHSKKYMLDRIARYFGGRAAEEIIFGKENITDGAGSDIYYATLIAKDIVTKYGMTEKFGPVFLEATEEDYMLQRKYYSEQTGKEVDDEIRKISLNNIQELKISY

SEQ ID NO: 23079 - protein, 603 aa, Clostridium tetani E88
MNNKKFSSATAWVIIFVFVIFASLYLARNNETATTITFNKFQKHWINNEIKSFEVKEDKMTVSGNLKDGSQYETIVPFERLNQFISAHDKNGEVIEKYALPAKTPMWLNWIPTALVILMFVIFWFMFMQQSQGGGGNRNVMNFGKSRAKMATPDKQKVTFNDVAGAEEEKEELAEIVDFLKQPKRYIEMGARIPKGVLLVGPPGTGKTLLAKAIAGEAGVPFFSISGSDFVEMFVGVGASRVRDLFDQAKKNSRCIIFIDEIDAVGRQRGAGLGGGHDEREQTLNQLLVEMDGFGVNEGIIMVAATNRPDILDPALLRPGRFDRQILVGAPDVRGREEILKVHSRNKPLSEEVKLDVLAKRTPGFTGADLENLMNESALLAVRKDKKQIDMEELEEAVTRVIAGPEKKSRVIDEEDRRLTAYHEAGHAVVMKLLPHADPVHQISIVPRGMAGGYTMHLPEKDRAYMSKSKLEEEIVGLLGGRVAEKLIIGDISTGAQNDIERATTIAKKMIMDYGMSEVLGPIAFGSGHDEVFLGRDFGKSKDFSEEVASKIDKEVKGIIDTAYDRAQNLLMENINKLHAVAKELLEKEKLEAEEFEEIFESN

SEQ ID NO: 23080 - protein, 624 aa, Clostridium tetani E88
MFDKNKKDPNYDNKKFKYIIYYVIAVTIVVYLINDYVVKTQTKNIKYTNFLNMITEQQIKEVKFAKDKIIIYPKEGIGFNEKILYTGKFNNDEQLLEKLNKANITYDFIIPEQDSPLKSFIFNWLMPFAILMALERIFFSRLNKKMGSGVMSFGKNTAKIYAENETGVTFKDVAGQEEAKESLMEIVDFLHNSDKYTGIGAKLPKGALLVGPPGTGKTLLAKAVAGEAKVPFFSISGSGFVEMFVGMGAARVRDLFEQAQEKAPCIIFIDEIDAIGKSRDGHVSGNDEREQTLNQLLAEMDGFDSSKGVVILAATNRPEVLDKALLRPGRFDRRVIVDRPDLKGREEILKVHAKGVKMDEKVDLTSIAKATPGAVGADLANIINEAALRAVKINRDKVFQGDLEEAVEIIIAGKEKKDRIMSPEEKKIVAFHEVGHALVAALLPNTDPVHKITIVPRTMGALGYTMQLPDTEKYLISKEEMLDKICVMLGGRAAEEVQFNRISTGASNDIEKATETARNMVTVYGMSERFDMMGLESISNRYLDGRPVRNCSNETSAIIDDEVLKIIKNSHEKSINLLEENKELLNRIAETLLEKETITGEEFMKIVEGKDIEIEDLETVIQEP

SEQ ID NO: 23081 - protein, 576 aa, Clostridium tetani E88
MFKNKKIILPIIIASLSLIFLLFFNYKTRSVTNKNYVEFLNALSSKKVVSVYLTDTPKIKIKLSDGNLYQMDNPRTDNFKETLLRQGVHVSENSPLNYLTLTFSASFILSVAFLVGILMKSSNITSKKAFSLDALDVSSTEETAFTFKNIAGNEEAKESVQDVIDFLKNPKKYESYGARMPKGIILYGEPGTGKTLLAKAIAGEAGVPFYALSGSDFVQVYVGVGASRIRQLFKKARNHKKVVIFIDEIDAIGKKRSNSKNGNSDERDQTLNALLTEMSGFNESEGIVVIAATNRLDMLDDALLRPGRFDRHIEVNLPDISAREKILSLYCENKPIKNFNIKDFAQKTAYFSGAKLENLVNEAAILACKEESEYIENIHFEKAFSIILAGYEKQNRDFIHNTDKKITAFHEAGHALVSMLMLPEEKVSKVTIIPSNKGAGGYTLSIPEDKLYKNKNYLNKKIMVLLAGRAAEELTFGADFITTGAHNDLKQCTNIAFHMITQYGMGNSLGLLNLEELMSLNIDKNNIILECKNLVDNLYIQTKQLLSDNTSILKSISEQLLEKETLYSDDLISLCN

SEQ ID NO: 23082 - protein, 666 aa, Tropheryma whipplei TW08/27
MSKITKSPVLYIVLLVVGVWVAVNLFLTNAYQSIRTEEGLELIKSDSLVSVRIVDRDQRVDLELATPYKNHGTKVQFNYVSQRATEIVNAVNKAKIKDGFTDEVPAPSVWGSIISMLLPIAAIGLFLWFMAGPQAAGGRGIAQFSRMRSRLVSKEMPKVRFTDVAGADEAVEELQEIKDFLSDPDKYRKLGARIPKGVLLFGPPGTGKTLLARAVAGEAGVPFFSISGSDFVEMFVGVGASRVRDLFEQAKQNSPSIIFIDEIDAVGRRRGSGFGGGHDEREQTLNQLLVEMDGFDVKTNIILIAATNRSDVLDSALLRPGRFDRHVAIDAPNLQGRLKILQVHARTKPVSKSVDLEVLARKTPGFTGADLANVLNEAALLTARSNAQIIDDRALDEAVDRVMAGPQRRSRVMTDHEKLVTAYHEAGHALTAAAMRYSDPVTKVTILPRSRALGYTMVMPVQDRYSVTRNELLDKLAYAMGGRAAEELVFHDPTTGASNDIEKATSIARKMVTEFGLSKDLGAVKFGNAHNETLMGVGQMTARDYSEVTAERIDVQVRALIQNARDEAWEVISNNRNLLDDLALNLLEKETLNQDEIAEIFKGVRKLPERHVWQSAPNREPSNKPPVKYSAMGPDSEVTAKSPKRTSNRRRLPSARRPRKDSETQE

SEQ ID NO: 23083 - protein, 675 aa, Oceanobacillus iheyensis HTE831
MSQVFRNALFWLLIFFVIIGVIGVINNQGEEREQYDVEQFISALNNGEIEELVFQPSHGIIRLTGTLTDGETEFVAQVPDNNDLVSQITDTAREQSQLTVMEEEQPSPWLTFLTGIIPFLLIGLFFLFILSQAQGGGGGGRVMNFGKSKAKMYSEDKKKVRFKDVAGADEEKQELVEVVEFLKDPRKFSQVGARIPKGVLLVGPPGTGKTLLARAVAGEAGTPFFSISGSDFVEMFVGVGASRVRDLFENAKKNAPCIIFIDEIDAVGRQRGAGLGGGHDEREQTLNQLLVEMDGFGANEGIIIIAATNRADILDPALLRPGRFDRQIMVDRPDVKGREAVLGVHAQNKPLDANVDLKTIAMRTPGFSGADLENLLNEAALIAARDDRKKLNQLDIDEAIDRVIAGPAKKSRVISQKERNIVAYHESGHTVIGMVLDDADVVHKVTIVPRGQAGGYAVMLPREDRYFMTKPELFDKITGLLGGRVAEEIIFGEVSTGASNDFQRATNIAHKMITEYGMSDKIGPLQFSSGGGGNVFLGRDIQNEQTYSDAIAHEIDKEMQSFINYCYDRAKTILTENKDQLELIAKTLLEVETLDAKQIKSLFEEGILPEPEEETDELKVNINSKEDEDKKGISYEEAKQKLDDEEKSEREEIDSENTSSDETQDDTSEDQNPKN

SEQ ID NO: 23084 - protein, 637 aa, Bacillus subtilis subsp. subtilis str. 168
MNRVFRNTIFYLLILLVVIGVVSYFQTSNPKTENMSYSTFIKNLDDGKVDSVSVQPVRGVYEVKGQLKNYDKDQYFLTHVPEGKGADQIFNALKKTDVKVEPAQETSGWVTFLTTIIPFVIIFILFFFLLNQAQGGGSRVMNFGKSKAKLYTEEKKRVKFKDVAGADEEKQELVEVVEFLKDPRKFAELGARIPKGVLLVGPPGTGKTLLAKACAGEAGVPFFSISGSDFVEMFVGVGASRVRDLFENAKKNAPCLIFIDEIDAVGRQRGAGLGGGHDEREQTLNQLLVEMDGFSANEGIIIIAATNRADILDPALLRPGRFDRQITVDRPDVIGREAVLKVHARNKPLDETVNLKSIAMRTPGFSGADLENLLNEAALVAARQNKKKIDARDIDEATDRVIAGPAKKSRVISKKERNIVAYHEGGHTVIGLVLDEADMVHKVTIVPRGQAGGYAVMLPREDRYFQTKPELLDKIVGLLGGRVAEEIIFGEVSTGAHNDFQRATNIARRMVTEFGMSEKLGPLQFGQSQGGQVFLGRDFNNEQNYSDQIAYEIDQEIQRIIKECYERAKQILTENRDKLELIAQTLLKVETLDAEQIKHLIDHGTLPERNFSDDEKNDDVKVNILTKTEEKKDDTKE

SEQ ID NO: 23085 - protein, 634 aa, Aquifex aeolicus VF5
MNALKNFFIWAIIIGAAIVAFNLFEGKREFTTKVSLNEVVKLVEEGKVSYAEVRGNTAIIQTKDGQKLEVTLPPNTNLVDKMVEKGVRVEVANPEPPGGWLVNVFLSWLPILFFIGIWIFLLRQMSGGGNVNRAFNFGKSRAKVYIEEKPKVTFKDVAGIEEVKEEVKEIIEYLKDPVKFQKLGGRPPKGVLLYGEPGVGKTLLAKAIAGEAHVPFISVSGSDFVEMFVGVGAARVRDLFETAKKHAPCIIFIDEIDAVGRARGAIPVGGGHDEREQTLNQLLVEMDGFDTSDGIIVIAATNRPDILDPALLRPGRFDRQIFIPKPDVRGRYEILKVHARNKKLAKDVDLEFVARATPGFTGADLENLLNEAALLAARKGKEEITMEEIEEALDRITMGLERKGMTISPKEKEKIAIHEAGHALMGLVSDDDDKVHKISIIPRGMALGVTQQLPIEDKHIYDKKDLYNKILVLLGGRAAEEVFFGKDGITTGAENDLQRATDLAYRMVSMWGMSDKVGPIAIRRVANPFLGGMTTAVDTSPDLLREIDEEVKRIITEQYEKAKAIVEEYKEPLKAVVKKLLEKETITCEEFVEVFKLYGIELKDKCKKEELFDKDRKSEENKELKSEEVKEEVV

SEQ ID NO: 23086 - protein, 651 aa, Brucella melitensis 16M
MVSIGPDMNPNYRNFALWAIIALLLIALFNLFQSPGQRTNSREISYSQFIDDVSNGRVKSVTITGQRISGTLADNGSTFQTYSPGDTGLVSRLEDKGVAITARPESDGSSSLIGILLSWLPMILILGVWIFFMRQMQGGPRGAMGFGKSKAKLLTEAHGRVTFQDVAGVDEAKQDLEEIVEFLRDPQKFQRLGGKIPRGVLLVGPPGTGKTLLARSVAGEANVPFFTISGSDFVEMFVGVGASRVRDMFEQAKKNAPCIIFIDEIDAVGRHRGAGLGGGNDEREQTLNQLLVEMDGFEANESIILIAATNRPDVLDPALLRPGRFDRQVVVPNPDIVGREQILKVHVRNVPLAPNVDLKVVARGTPGFSGADLANLVNEAALMAARRNKRLVTMQEFEDSKDKIMMGAERRSAMTPEEKTNTAYHEAGHAIVALNVPKADPVHKATIIPRGRALGMVMQLPEGDRYSATYTWMVSRLAIMMGGRVAEELKFGKENITSGASSDIQQATKLARSMVTQWGYSDKLGRVAYGDNQEEVFLGHSVSRTQNISEETAQIIDAEVRRLIDEAYAEATRILTKKKKDWIALAEGLLEYETLTGDEINELIAGNKPSRDQGNDTPSRGSGVPKAGSSRKRKGSEPGGEPGMEPKPQPQ

SEQ ID NO: 23087 - protein, 718 aa, Enterococcus faecalis V583
MNKKNNGMKNGLYYVLVVLAMVMVVYFIFGNNNQQSPDIDYSTFQQQLEDGKVKDMTIQPTNGVYRIEGQYKEKQEVKDTGGLSLWGSTQASSKGFTTTVLPSDTTLAGIQDAAQNNKVKLVVKEQSTSGAWLSLLFSFLPLVIIFFFFYMMMSQQGGGGGGGGRVMNFGKSKAKEADKKANRVRFSDVAGAEEEKQELVEVVEFLKDPRRFAELGARIPAGVLLEGPPGTGKTLLAKAVAGEAGVPFYSISGSDFVEMFVGVGASRVRDLFETAKKNAPAIIFIDEIDAVGRQRGAGMGGGHDEREQTLNQLLVEMDGFDGNEGVIVIAATNRSDVLDPALLRPGRFDRQILVGRPDVKGREAILRVHAKNKPLADDVDLKVVAQQTPGFAGADLENVLNEAALVAARRNKKKIDASDVDEAEDRVIAGPAKKDRVINKKEREMVAYHEAGHTIVGLVLSRARVVHKVTIIPRGRAGGYMIALPKEDQFLMTKEDMFEQIVGLLGGRTAEEIIFGVQSTGASNDFEQATGIARSMVTEYGMSDKLGPVQYEGNHQVFVGRDYGQTKAYSEQVAFEIDQEVRRILMDAHTKAHEIIEAHREQHKLIAEKLLEYETLDAKAIKSLFETGKMPEGADSDYPSEKEAQTFEEAKRALEEKEAQKQVEEKQDFEEAKKELHDEAEEVKVESEQTEKEVQSEEKKDSDSNSEYDRNNYEDRYK

SEQ ID NO: 23088 - protein, 633 aa, Bacillus cereus ATCC 14579
MNRIFRNTIFYLLIFLVVIGIVSYFNGSTQKTTSVSYDKFITKLESGEVRNVQLQPKNGVFEVKGQFNNSSQGEQFVTYAPNTEELQKKINDKAKGAEVKYQPAEETSAWVTFFTSIIPFVIIFILFFFLLNQAQGGGSRVMNFGKSKAKLYNDEKKKVRFRDVAGADEEKQELVEVVEFLKDPRKFSEVGARIPKGVLLVGPPGTGKTLLARAVAGEAGVPFFSISGSDFVEMFVGVGASRVRDLFENAKKNAPCIIFIDEIDAVGRQRGAGLGGGHDEREQTLNQLLVEMDGFGANEGIIIVAATNRPDILDPALLRPGRFDRQITVDRPDVNGREAVLKVHARNKPLDEHINLRAIATRTPGFSGADLENLLNEAALVAARQDKKKIDMSDIDEATDRVIAGPAKKSRVISEKERNIVAFHEAGHTVIGVVLDEADVVHKVTIVPRGQAGGYAVMLPKEDRYFMTKPELLDKITGLLGGRVAEEIVFGEVSTGAHNDFQRATGIARRMVTEFGMSDKLGPMQFGSSQGGQVFLGRDFHSEQNYSDAIAHEIDMEMQSIMKECYARAKQILTENRDKLDIIAQTLLEVETLDAEQINHLCDYGRLPERPTSSDDVKVNINMKKDDEDKEDK

SEQ ID NO: 23089 - protein, 913 aa, Chlamydophila caviae GPIC
MSKDKKMKPESKKSFPTLFFFLLFGVIFAVIAVQNFLVTKKARVSFSHQLEHLVNLKLIYPEDSRKIALNDNLVSFSGRFRDSSTDESQLRYHYLELIDQRHQLEFDLQEINKSLDNLSKEVESSVLWFSAISGWSIPETGYLISPSVELGKSSLGALVIQAPNNFQIINLRSLEQRYQTLPRSSEGLRTFGSDLYELIGKYLSPALGIGSESVKRELKDLYQQVEVSLTQSMDAEHLSALYQRVLDSLQRISSSLALSDNGERFGQLRSVRLYREERSKYEKLIEDSQINQVQLDKLRSDLSQVVWYFNNQELSSRALEKQDPEVFAHWFSGAKQEWEDFSHNRSLTFKAPDQPRNLVLEKTFKSEEPAPHYIGYLFTFLPIILVLVFVYFVFAKQVRGMNGSAMSFGKSPARLLTNGQNKVTFADVAGIEEAKEELIEIVDFLKNPTKFTSLGGRIPKGVLLIGPPGTGKTLIAKAVSGEADRPFFSIAGSDFVEMFVGVGASRIRDMFEQAKRNAPCIIFIDEIDAVGRHRGAGIGGGHDEREQTLNQLLVEMDGFGTNEGVILMAATNRPDVLDKALLRPGRFDRRVVMNLPDIKGRFEILSVHAKRIKLDPTVDLMAVARSTPGASGADLENLLNEAALLAARKDRTAVTAVEVAEARDKVLYGKERRSLEMDAEERKTTAYHESGHAVVGLCVQHADPVDKVTIIPRGLSLGATHFLPEKNKLSYWKKELFDQLAVLMGGRAAEDIFLGDISSGAQQDISQATKLVRSMVCEWGMSEQLGTVTYDERSDSSTGYGSYHEKSYSEETAKAIDGELRALLDAAYQRALTIIREHRDEVELMTQMLIEFETLDAKDVKEIMDHTWDPERKRARLKEEGILFKKVSDDLPPPPPQENAMKDGTLKLNNTTT

SEQ ID NO: 23090 - protein, 610 aa, Thermotoga maritima
MNRSNIWNLLFTILIIVTLFWLARFFYVENSPVSKLSYTSFVQMVEDERSVVSEVVIRDDGVLRVYTKDGRVYEVDAPWAVNDSQLIEKLVSKGIKVSGERSGSSSFWINVLGTLIPTILFIVVWLFIMRSLSGRNNQAFTFTKSRATMYKPSGNKRVTFKDVGGAEEAIEELKEVVEFLKDPSKFNRIGARMPKGILLVGPPGTGKTLLARAVAGEANVPFFHISGSDFVELFVGVGAARVRDLFAQAKAHAPCIVFIDEIDAVGRHRGAGLGGGHDEREQTLNQLLVEMDGFDSKEGIIVMAATNRPDILDPALLRPGRFDKKIVVDPPDMLGRKKILEIHTRNKPLAEDVNLEIIAKRTPGFVGADLENLVNEAALLAAREGRDKITMKDFEEAIDRVIAGPARKSKLISPKEKRIIAYHEAGHAVVSTVVPNGEPVHRISIIPRGYKALGYTLHLPEEDKYLVSRNELLDKLTALLGGRAAEEVVFGDVTSGAANDIERATEIARNMVCQLGMSEELGPLAWGKEEQEVFLGKEITRLRNYSEEVASKIDEEVKKIVTNCYERAKEIIRKYRKQLDNIVEILLEKETIEGDELRRILSEEFEKVVE

SEQ ID NO: 23091 - protein, 624 aa, Thermus thermophilus
MPRAPFSLLALVLGLAFLAWPSASRGTVGAPSGTVNYTTFLEDLKAGRVKEVVVRAGDTRIQGVLEDGSAFTTYAASPPDNATLEGWMARGVSVRVEPPQGQNALGFLWPLLLVGLLIGALYYFSRNGRAGPSDSAFSFTKSRARVLTEAPKVTFKDVAGAEEAKEELKEIVEFLKNPSRFHEMGARIPKGVLLVGPPGVGKTHLARAVAGEARVPFITASGSDFVEMFVGVGAARVRDLFETAKRHAPCIVFIDEIDAVGRKRGSGVGGGNDEREQTLNQLLVEMDGFEKDTAIVVMAATNRPDILDPALLRPGRFDRQIAIDAPDVKGREQILRIHARGKPLAEDVDLALLAKRTPGFVGADLENLLNEAALLAAREGRRKITMKDLEEAADRVMMGPAKKSLVLSPRDRRITAYHEAGHALAAHFLEHADGVHKVTIVPRGRALGFMMPRREDMLHWSRKRLLDQIAVALAGRAAEEIVFDDVTTGAENDFRQATELARRMITEWGMHPEFGPVAYAVREDTYLGGYDVRQYSEETAKRIDEAVRRLIEEQYQRVKALLLEKREVLERVAETLLERETLTAEEFQRVVEGLPLEAPEEAREEREPPRVVPKVKPGGALGGA

SEQ ID NO: 23092 - protein, 278 aa, Thermus thermophilus
GPLGSHMGARNGRAGPSDSAFSFTKSRARVLTEAPKVTFKDVAGAEEAKEELKEIVEFLKNPSRFHEMGARIPKGVLLVGPPGVGKTHLARAVAGEARVPFITASGSDFVEMFVGVGAARVRDLFETAKRHAPCIVFIDEIDAVGRKRGSGVGGGNDEREQTLNQLLVEMDGFEKDTAIVVMAATNRPDILDPALLRPGRFDRQIAIDAPDVKGREQILRIHARGKPLAEDVDLALLAKRTPGFVGADLENLLNEAALLAAREGRRKITMKDLEEAAS

SEQ ID NO: 23093 - protein, 254 aa, Thermus thermophilus
GPLGSVLTEAPKVTFKDVAGAEEAKEELKEIVEFLKNPSRFHEMGARIPKGVLLVGPPGVGKTHLARAVAGEARVPFITASGSDFVEMFVGVGAARVRDLFETAKRHAPCIVFIDEIDAVGRKRGSGVGGGNDEREQTLNQLLVEMDGFEKDTAIVVMAATNRPDILDPALLRPGRFDRQIAIDAPDVKGREQILRIHARGKPLAEDVDLALLAKRTPGFVGADLENLLNEAALLAAREGRRKITMKDLEEAAS

SEQ ID NO: 23094 - protein, 614 aa, Cyanidium caldarium
MKKQWKKIVLFVLPVIITLITLSSFLFYNQDVVHNWSSSRMTYGRFLEYIDMNWVKKVDLYDNARTAIVDIINPDIKGEEQLVRVELPTFSSELVSKLKNKLIDFDAHPSSSNVNLVSWLSNLLLPLILIITLFFFFRRGNKSSSGPGQAFNFGKAKARFHMEAKTGIVFEDVAGIEEAKEELQEIVAFLKDSRKFTNVGATIPKGVLLVGPPGTGKTLLAKAIAGEASAPFFSISGSEFVEMFVGVGASRVRDLFKKAKEKAPCIVFIDEIDAVGRQRGVGIGGGNDEREQTLNQLLTEMDGFSGDTGVIVVAATNRIDVLDSALLRPGRFDRQIMVSLPNINGRLAILKVHSKKKKIHKDVLLEVIARRTPGFSGADLANLLNEAAILTVRRGKVEITMKEIEDSIDKIIAGLEGSPLADSRIKRLIAYHEAGHAVAATFLPHHDPVQKVTLIPRRQAKGLTWFLPNDDQFLVSKSQILSKIIAALAGRAMEEIVFGLPEVTIGAANDIKQVTFMARQMVTKFGMSKVGPICLENSSSEVFIGRDLMGRHELSEEMVAKVDLEVRSILKDCYIQARTILSQNRKLIDRVVNELVEKETIEAKEFMRIVEERV

SEQ ID NO: 23095 - protein, 601 aa, Heliobacillus mobilis
MSRIVKNLAIYILIVLLAISVLRVTKTPEPAQEPISYTQFYQLLVTDQIKELNAISERDRTEITGVKKDGNRFTTIGPVDIKRITDIVLDKQIPFTQKPAPEPPWWTGLFSTLLPILVLVGLFFFMMQQTQGGGSRVMQFGKSRAKLHTDDKKKVTFEDVAGADEVKEELQEVVDFLKHPKKFVELGAKIPKGVLLFGPPGTGKTLLARAVAGEAGVPFFSISGSDFVEMFVGVGASRVRDLFEQAKKNSPCIVFIDEIDAVGRQRGAGLGGGHDEREQTLNQLLVEMDGFSANEGIIIIAATNRPDILDPALLRPGRFDRQIVVDRPDIRGRKEILGVHVKGKPLDETIDLDVLARRTPGFTGADLANMVNEAALLAARRGTKKVGMHEMEDAIERVIAGPEKKARVISEFEKKLVSYHEAGHALVGGLLEHTDPVHKISIIPRGWAGGYTLLLPEEDRHYMTKSHLLDQVTMLLGGRVAEAIVLKEISTGASNDLERATDLVRKMITEYGMSEELGPLTFGHKQEQVFLGRDLARDRNYSEAVAFSIDKEARRIIEECYGKAKKILESNADKLHLIAQTLMDKETIEASEFTELMKKVS

SEQ ID NO: 23096 - protein, 822 aa, Mycoplasma penetrans
MEFNKLELLIIRALKLNTNSNKKNSFYNKFLNLRNKVLNIQKNSLDQPSDAPSNNKKRNLDQPDNPNQKEPGKARKIIWSFIIIILVLGVLALIILSGFSFSATSLNAASFTENGTSSFKITTNTNQTRTIGGAPSTIYQRDSTLYVIYIENSFSGYYYSAIITDISVSNNTASVGNGSNTTGGSTSNLQKGLQIANLLVDGSGNVYKNKDNNGSTTSGTTTFSLNSNLTSAMKLQGWSSNQSMSLPTSYSFYTAASLVLSILPFILLIGIIYYSMRKMGQAGGGQDNVFSIGKSQAKLAKSTVLFSDVAGIEEEKEELIEIVDYLKRPDRYAAMGARVPKGVILYGPPGTGKTLLAKAVAGEAKVPFFQVSGSAFEDMLVGVGAKRVRDLFNKAVKSAPAIIFIDEIDSVGSKRGKFETTAGSLADQTLNQLLAEMDGFNTKTGVIVMAATNRLDVLDDALLRPGRFDRHIQVNLPDIKERVAILKIHSRNKNISETVDLEDIARRTPGFSGAQLENVLNEATLLAVRRNKKSIYTEELDEAIDRVIAGPAKKTRVISLEEKRQIAFHEAGHAIVGMYTKGSEVVEKITIIPRGQAAGYTLSVPEIQELSIQKKSDLLGMVAGLLGGRASEEINFGKEFISTGAANDLYKATNIVRAMVTQFGMSPNVGLAQYYPSEGTVNPYQSKNFSESTSQLIDKEIERIFKERYEYAYKIIKEHNKEVELIVESLLLLETIVKPQIDFIHKYKQLPKEALEKKKELEEKKKAEDLIRKAKKESEASSKEEKEMDVEKKVQKPSASSTEPTSKPKKAPSKESSSDKKK

SEQ ID NO: 23097 - protein, 560 aa, Geobacter metallireducens
MNAVTIQGNEIIGKFADGKEFRSYKPLDATLSDKLLEKKISISAKPEEEKVSWFSIFISWFPLLFLVGVWIFFMRQMQGGGGKAMAFGKSRAKLLTEAQGRITFEDVAGVDEAKEELEEIIQFLKDPKKFTKLGGRIPKGVLLVGPPGTGKTLLARAVAGEAGVPFFSISGSDFVEMFVGVGASRVRDLFVQGKKNAPCIIFIDEIDAVGRHRGAGLGGGHDEREQTLNQLLVEMDGFESNEGVILIAATNRPDVLDPALLRPGRFDRQVVVPQPDVKGREMILKVHTKKTPLGPNVNLDVIARGTPGFSGADLANVVNEAALLAARKDKSVVDMQDFDDAKDKVLMGVERRSMVISEDEKKNTAYHEAGHTLVAKLIPGSDPVHKVSIIPRGRALGITMQLPSEDKHSYSKEALLNRIAVLMGGRAAEDIIFGSLTTGAGNDIERATDLARKMVCEWGMSDKMGPVSFGKKEESIFLGRDMSMHKNYSEATAVEIDGEIRKIVEDSYSRVTTLLRDNIDILHKLSLELIEKENLTGDEVEQIVRSVRGTVPASEEIPAS

SEQ ID NO: 23098 - protein, 619 aa, Geobacter metallireducens
MGQSVWKPLILVFVLIIVFNFVYGYFARQTAEGGVSISYSRFKDELAADNIKKISLKGNSISGEFRNKVPLTDSASGKPVVRDITQFTTIKPAIEDPSLMADLQSKKVDVTAVTTEVSPLLSGLLYLLPWILIIGVWWLAMRGMRGQSPGAMMGGFAKSGAQMYTPGEKSRVTFDDVAGMENAKLELREIVDYLRDPKKFQQIGGKVPKGVLLVGPPGTGKTLLARAVAGEAGVTFLSITASQFIEMFVGVGAGRVRDLFATAKKSAPSIIFIDEIDAVGRSRGAGLGGGHDEREQTLNQLLSEMDGFDPHDEVIVMAATNRPDVLDAALLRPGRFDRHVVIDRPDWRDREKILQVHTRKIPMDKDVSLAVIARGTPGMTGADLENLVNEAAILAARENSSTVTMEHLERAKDKVLMGGERKMYITDQEKRITAYHEAGHTLVAKLLPGTDPVHKVTIIPRGQALGVTQQLPEDDRYHYSKTYLVNRLSVALGGRVAERLVFGDLSTGAQNDLKMVNDLAEKMVCQWGMSDKIGAMTFRRGEEHPFLGRKLAEEKTFSEQMAWLIDQEIAVVIKEAEAKAEEIITGNRDKLDILVEALIEEETLDGKRINGLLGLAERQ

SEQ ID NO: 23099 - protein, 402 aa, Dermacentor variabilis
MAAAAVTTPPVAPVGDQIEKYREDYRKKLTEHKEVESRLKEMREQLKELNKQYEKSENDLKALQSVGQIVGEVLKQLTEEKFIVKATNGPRYVVGCRRQLDKAKLKPGTRVALDMTTLTIMRYLPREVDPLVYNMSHEDPGNISYSMIGGLAEQIRELREVIELPLLNPELFQRVGITPPKGCLLYGPPGTGKTLLARAVASQIEANFLKVVSSAIVDKYIGESARLIREMFNYARDHQPCVIFMDEIDAIGGRRFSEGTSADREIQRTLMELLNQMDGFDSLGQVKIIMATNRPDTLDPALLRPGRLDRKIEIPLPNEQARLDIVKIHATPITKHGEVDWEAVVKLSDGFNGADLRNVCTEAGMFAIRADREFVIEEDFMKAVRKVADNKKLESKLDYKPV

SEQ ID NO: 23100 - protein, 706 aa, Plasmodium falciparum 3D7
MLLLRNIVILDLKRSNKLLNINNLPKIACILNTRKGFSVLKNERLDRLKREVRNKPNDNFLILQFYKEANVHNPNEVIKHYENANYIKDESITKEYIKALVYTNKLKYTNLDNIKYDSDHNMYNKSMHDTTTNEMHSNERSNNIYEGNNVNSENNYNNMSSNHSTHKVEYMDKKRNQHPEMYSLHIDPKKPLKVSVIDSNKKGLWNLLKSTIGFLILVAAGSVYMEGVSQNVQKGIGVSNKKIIPVENVKVTFADVKGCDEVKQELEEIIDYLKNSDKFTKIGAKLPKGILLSGEPGTGKTLIARAIAGEANVPFLQASGSEFEEMFVGVGARRIRELFQAAKKHAPCIVFIDEIDAVGSKRSSRDNSAVRMTLNQLLVELDGFEQNEGIVVICATNFPQSLDKALVRPGRLDKTIVVPLPDIKGRYEILKMYSNKIVLSKDVDLHVLSRRTVGMTGADLNNILNIAAIKCSVEGKKSVDMNSIEQAFDRVVVGLQRKSPLNEEEKNITAYHEGGHTLVNFYTKGSDPVHKATIMPRGMSLGVTWKIPISDKYSQKIKDVQSEIDILMGGLVSEEIIFGKNNVTTGCSSDLQKATHIAQSLVMNYGVGINEDNISMFLHDKQNISEEMKIKIDKSIQRILLDSYNRAKNVLNQHIDELHRIASALVEYETLTSDEIKLAMQGKCDQIRKNREIKQKEYNLKDSRIS

SEQ ID NO: 23101 - protein, 880 aa, Plasmodium falciparum 3D7
MSSKYDNQSFLSTGSDKYGEQENSVLLHDEEDEYINENKKKRNERDKKFRYYENFFNRRRSKKWNYFIIFFLGVCLGFAIWPFFMTIITYRLFYKDNFNNTNYRTNNSSTSLKSYGNEKNKKSDNNGKVPMKDQSPNKVSPHFKPIRFEEIAGIDESKLELLEVVDFIKNREKYHEMGARMPKGVLLVGPPGSGKTMLARAVATEANVPYIYTSGPEFIEIYVGQGAKRIRQLFAHARSVAPSIVFIDEIDAIGGKRSSGSVNGAGQREHDQTLNQLLVEMDGFSNTVHIMVIGATNRIDTLDSALLRPGRFDRIVYVPLPDINGRKKILEIYIKKIKSDLKLEDIEKIARLTPGFSGADLENVVNEATILATRNNKSLVTINELYEARDKVSMGPERKSLRQSDHQRRITAYHEAGHAIVAYFLQPKTDPIHKATIISRGNALGYVEQIPVDDRHNYFKSQMEAKLAVCMGGRTAEEIVFGKSETSSGASSDISRATEIAYKMVTEWGMSDKLGPLNYKKRMGDGYSSNRLSAQTVSSIEVEVKSLVEKGKSLSEEILRRHRKELDNLAFALLDKETLSGEEIKNIIDPNNSKNYSGKVEMLKNDTKKNEKKSNSVSKNKSTISEDYDKNQNNVEQNYQSHDHTLVKNEENLNNMKNDIDDNNTRDGQVNSDSFVKRKEVTDQDINGKELSEMDNKEIKENKKLDGEELNKIIIDNDKMGDMKKNIKEVIKKMKKKQSKGSYKTYKNVLKSVSEHKELKTQKKADENKIVADNNEKSSNNSLDKNNTQGSIDEKGYKNNNNNNNNMVKNINELFEENFPEYKKYDNENNDFVKTKENYFDNFNEVIDISHIKNVDEMKKFNIFEHNLNKLFLFDIFKSD

SEQ ID NO: 23102 - protein, 1052 aa, Plasmodium falciparum 3D7
MYRADIIRKKSTCLLLPSEKNAFQKKKWLLKKSLDNLLDYNNTQKECLHSLSYLKDRINNNNNNNMKNGYKELAVCSSSIKYNSNVDYNIFFDSLNFICEHVQNIWSNKNKHVQINENISNMFVKFLKKYNHFKNGNYKIKNRLYKKDSFIKPSNYLQSFLLNGKCDEGEKIIKKILKDNKSLKSIKKKIMRKNEDFIWSRERNMTNLSGHNQSEHTLGESIINNNNNNNIINNVIKKHMSFTNSRYIGFLNNNVSKYKLNFFQFLKNMYLSKAPKGFERFENKSPNSNNFKPEEEKPRKYDNYFFYIFFILLLFFLLFVDSNGLYNEITQNDFFYKYLSKGYVEKIKLINKDYVKAYLNSHGIKKYHMKYVSFRVGNSDSFEKKVEAVQREMNIKRDELIEVQYVNEANILNEVKGYIPSILFFLLLIFLFQKITLKNVTNSGMDKLFKFSKISPINKNSLKTDVKFSSVAGMKQAKEEIMEFVDFLKNPTKYEILGAKIPKGALLCGAPGTGKTLLAKAVAGEANVPFFNISGSDFIEVFVGIGPSRVRELFAQARKHAPSIIFIDEIDAVGRKRSKGGFSGGGNDERENTLNQMLVEMDGFHTSNDKVVVLAGTNRVDILDPAITRPGRFDRIVNISKPDINERSEIFQVHLKNLKLHESLDIKNISYILASLTPGFVGADIANVVNEGAIQCARRSNLLGVQIKDFELAIERVIGGLPKSSSLISPLEKKIISYHETGHALIGWFLEFADPVLKVSIIPRNNGALGYSQHLSEEIMLFSRDAILDKIAVILGGRAAEELFIGKITTGAIDDLNKVTQLAYSYVSQYGMNQEIGLVSFQPNSNSEYNLYRPHSECLAHLIDNEVRSLIETQYKRVKSILMKNEKHVHNLANLLYEKETISYHDIVKCVGERPYPVKSAYEKFVKANPYKAISSEPLLEDKKESDNMKGDTSNIGNVNTNDFEKGHIKENTKECTKENTKENTKDNTKENTKENTKEYTKDNTKNQYNILGNSSKDDTKQTSSKLNEEKCKEKLGDSKKKDNKISNVKLR

SEQ ID NO: 23103 - protein, 695 aa, Arabidopsis thaliana
MAASSACLVGNGLSVNTTTKQRLSKHFSGRQTSFSSVIRTSKVNVVKASLDGKKKQEGRRDFLKILLGNAGVGLVASGKANADEQGVSSSRMSYSRFLEYLDKDRVNKVDLYENGTIAIVEAVSPELGNRVERVRVQLPGLSQELLQKLRAKNIDFAAHNAQEDQGSVLFNLIGNLAFPALLIGGLFLLSRRSGGGMGGPGGPGNPLQFGQSKAKFQMEPNTGVTFDDVAGVDEAKQDFMEVVEFLKKPERFTAVGAKIPKGVLLIGPPGTGKTLLAKAIAGEAGVPFFSISGSEFVEMFVGVGASRVRDLFKKAKENAPCIVFVDEIDAVGRQRGTGIGGGNDEREQTLNQLLTEMDGFEGNTGVIVVAATNRADILDSALLRPGRFDRQVSVDVPDVKGRTDILKVHAGNKKFDNDVSLEIIAMRTPGFSGADLANLLNEAAILAGRRARTSISSKEIDDSIDRIVAGMEGTVMTDGKSKSLVAYHEVGHAVCGTLTPGHDAVQKVTLIPRGQARGLTWFIPSDDPTLISKQQLFARIVGGLGGRAAEEIIFGDSEVTTGAVGDLQQITGLARQMVTTFGMSDIGPWSLMDSSAQSDVIMRMMARNSMSEKLAEDIDSAVKKLSDSAYEIALSHIKNNREAMDKLVEVLLEKETIGGDEFRAILSEFTEIPPENRVPSSTTTTPASAPTPAAV

SEQ ID NO: 23104 - protein, 685 aa, Arabidopsis thaliana
MAASSACLLGNGLSVYTTKQRFQKLGLDRTSKVTVVKASLDEKKHEGRRGFFKLLLGNAAAGVGLLASGNANADEQGQGVSSSRMSYSRFLEYLDKGRVEKVDLYENGTIAIVEAVSPELGNRIQRVRVQLPGLSQELLQKLRAKNIDFAAHNAQEDQGSPILNLIGNLAFPVILIGGLFLLSRRSSGGMGGPGGPGFPLQIGQSKAKFQMEPNTGVTFDDVAGVDEAKQDFMEVVEFLKKPERFTAVGARIPKGVLLVGPPGTGKTLLAKAIAGEAGVPFFSISGSEFVEMFVGVGASRVRDLFKKAKENAPCIVFVDEIDAVGRQRGTGIGGGNDEREQTLNQLLTEMDGFEGNTGVIVVAATNRADILDSALLRPGRFDRQVSVDVPDVKGRTDILKVHSGNKKFESGVSLEVIAMRTPGFSGADLANLLNEAAILAGRRGKTAISSKEIDDSIDRIVAGMEGTVMTDGKSKSLVAYHEVGHAICGTLTPGHDAVQKVTLIPRGQARGLTWFIPSDDPTLISKQQLFARIVGGLGGRAAEEVIFGESEVTTGAVSDLQQITGLAKQMVTTFGMSEIGPWSLMDSSEQSDVIMRMMARNSMSEKLANDIDTAVKTLSDKAYEIALSQIRNNREAMDKIVEILLEKETMSGDEFRAILSEFTEIPPENRVASSTSTSTPTPASV

SEQ ID NO: 23105 - protein, 662 aa, Arabidopsis thaliana
MAASSACLLGNGLSVYTTKQRFQKLGLDRTSKVTVVKASLDEKKHEGRRGFFKLLLGNAAAGVGLLASGNANADEQGQGVSSSRMSYSRFLEYLDKGRVEKVDLYENGTIAIVEAVSPELGNRIQRVRVQLPGLSQELLQKLRAKNIDFAAHNAQEDQGSPILNLIGNLAFPVILIGGLFLLSRRSSGGMGGPGGPGFPLQIGQSKAKFQMEPNTGVTFDDVAGVDEAKQDFMEVVEFLKKPERFTAVGARIPKGVLLVGPPGTGKTLLAKAIAGEAGVPFFSISGSEFVEMFVGVGASRVRDLFKKAKENAPCIVFVDEIDAVGRQRGTGIGGGNDEREQTLNQLLTEMDGFEGNTGVIVVAATNRADILDSALLRPGRFDRQVSVDVPDVKGRTDILKVHSGNKKFESGVSLEVIAMRTPGFSGADLANLLNEAAILAGRRGKTAISSKEIDDSIDRIVAGMEGTVMTDGKSKSLVAYHEVGHAICGTLTPGHDAVQKVTLIPRGQARGLTWFIPSDDPTLISKQQLFARIVGGLGGRAAEEVIFGESEVTTGAVSDLQQITGLAKQMVTTFGMSEIGPWSLMDSSEQSDVIMRMMARNSMSEKLANDIDTAVKTLSDKAYEIALSQIRNNREAMDKIVEILLEKETMSGDEFRAILSEF

SEQ ID NO: 23106 - protein, 687 aa, Arabidopsis thaliana
MKMASSSSALSFPLSNIPTCSKKSQQFQKPASLSKSSHTHKPSLKTQILHHKFTKRNLLSLTTALGFTSALGTVLAHPAKAEPEAPIEATSNRMSYSRFLQHLKENEVKKVDLIENGTVAIVEISNPVVGKIQRVRVNLPGLPVDLVREMKEKNVDFAAHPMNVNWGAFLLNFLGNLGFPLILLVSLLLTSSSRRNPAGPNLPFGLGSKAKFQMEPNTGITFEDVAGVDEAKQDFEEIVEFLKTPEKFSALGAKIPKGVLLTGPPGTGKTLLAKAIAGEAGVPFFSLSGSEFIEMFVGVGASRARDLFNKAKANSPCIVFIDEIDAVGRMRGTGIGGGNDEREQTLNQILTEMDGFAGNTGVIVIAATNRPEILDSALLRPGRFDRQVSVGLPDIRGREEILKVHSRSKKLDKDVSLSVIAMRTPGFSGADLANLMNEAAILAGRRGKDKITLTEIDDSIDRIVAGMEGTKMIDGKSKAIVAYHEVGHAICATLTEGHDPVQKVTLVPRGQARGLTWFLPGEDPTLVSKQQLFARIVGGLGGRAAEDVIFGEPEITTGAAGDLQQVTEIARQMVTMFGMSEIGPWALTDPAVKQNDVVLRMLARNSMSEKLAEDIDSCVKKIIGDAYEVAKKHVRNNREAIDKLVDVLLEKETLTGDEFRAILSEYTDQPLNTDGDVRIRINDLISV

SEQ ID NO: 23107 - protein, 501 aa, Arabidopsis thaliana
RSSGGMGGPGGPGFPLQIGQSKAKFQMEPNTGVTFDDVAGVDEAKQDFMEVVEFLKKPERFTAVGARIPKGVLLVGPPGTGKTLLAKAIAGEAGVPFFSISGSEFVEMFVGVGASRVRDLFKKAKENAPCIVFVDEIDAVGRQRGTGIGGGNDEREQTLNQLLTEMDGFEGNTGVIVVAATNRADILDSALLRPGRFDRQVSVDVPDVKGRTDILKVHSGNKKFESGVSLEVIAMRTPGFSGADLANLLNEAAILAGRRGKTAISSKEIDDSIDRIVAGMEGTVMTDGKSKSLVAYHEVGHAICGTLTPGHDAVQKVTLIPRGQARGLTWFIPSDDPTLISKQQLFARIVGGLGGRAAEEVIFGESEVTTGAVSDLQQITGLAKQMVTTFGMSEIGPWSLMDSSEQSDVIMRMMARNSMSEKLANDIDTAVKTLSDKAYEIALSQIRNNREAMDKIVEILLEKETMSGDEFRAILSEFTEIPPENRVASSTSTSTPTPASV

SEQ ID NO: 23108 - protein, 443 aa, Brassica napus
MGQGPSGGLNRPGDRKPDGNEKKEKKFEPAAPPSRVGRKQRKQKGPEAAARLPTVTPSTKCKLRLLKMERIKDYLLMEEEFVANQERLKPQEEKAEEDRSKVDDLRGTPMSVGNLEELIDENHAIVSSSVGPEYYVGILSFVDKDQLEPGCSILMHNKVLSVVGILQDEVDPMVSVMKVEKAPLESYADIGGLEAQIQEIKEAVELPLTHPELYEDIGIKPPKGVILYGEPGTGKTLLAKAVANSTSATFLRVVGSELIQKYLGDGPKLVRELFRVADDLSPSIVFIDEIDAVGTKRYDANSGGEREIQRTMLELLNQLDGFDSRGDVKVILATNRIESLDPALLRPGRIDRKIEFPLPDIKTRRRIFQIHTSKMTLSEDVNLEEFVMTKDEFSGADIKAICTEAGLLALRERRMKVTHPDFKKAKEKVMFKKKEGVPEGLYM

SEQ ID NO: 23109 - protein, 425 aa, Prunus persica
MAPEPEDIKDEKNPRPLDEDDIALLKTYGLGPYSTHIKKAEKEVKDLAKKVNDLCGIKESDTGLAAPSQWDLVSDKQMMQEEQPLQVARCTKIINPNSEDAKYVINVKQIAKFVVGLGDKVSPTDIEEGMRVGVDRNKYQIQIPLPPKIDPSVTMMTVEEKPDVTYNDVGGCKEQIEKMREVVELPMLHPEKFVKLGIDPPKGVLCYGPPGTGKTLLARAVANRTDACFIRVIGSELVQKYVGEGARMVRELFQMARSKKACIVFFDEVDAIGGARFDDGVGGDNEVQRTMLEIVNQLDGFDARGNIKVLMATNRPDTLDPALLRPGRLDRKVEFGLPDLESRTQIFKIHTRTMNCERDIRFELLARLCPNSTGADIRSVCTEAGMYAIRARRKTVTEKDFLDAVNKVIKGYQKFSATPKYMVYN

SEQ ID NO: 23110 - protein, 645 aa, Sinorhizobium meliloti
MNPNFRNFALWAIIALLLIALFSMFQQPTERAGSREIPFSQFLKDVDASRVKDVVITGSKVIGSYTESGATFQTYAPAVDTALTERLEAKDVTVTVRPETDGSSGFLSYIGTLLPMLLILGVWLFFMRQMQGGSRGAMGFGKSKAKLLTEAHGRVTFDDVAGVDEAKQDLEEIVEFLRDPQKFQRLGGRIPRGVLLVGPPGTGKTLLARSVAGEANVPFFTISGSDFVEMFVGVGASRVRDMFEQAKKNAPCIIFIDEIDAVGRHRGAGLGGGNDEREQTLNQLLVEMDGFEANEGIILIAATNRPDVLDPALLRPGRFDRQVVVPNPDINGRERILKVHVRNVPLAPNVDLKVLARGTPGFSGADLMNLVNESALMAARRNKRLVTMQEFEDAKDKIMMGAERRSSAMTEAEKKLTAYHEAGHAILALNVPSADPLHKATIIPRGRALGMVMQLPEGDRYSMSYKWMISRLAIMMGGRVAEELTFGKENITSGASSDIEQATKLARAMVTQWGFSDQLGQVAYGENQQEVFLGHSVAQQKNVSESTAQKIDNEIRRLIDEAYETARRILVEKNHEFVALAEGLLEYETLTGDEIKALIRGEKPARDLGDDTPPHRGSAVPSAGTKKEAGTKGEEPEGGFEPQPQ

SEQ ID NO: 23111 - protein, 691 aa, Glycine max
MAAPLACLVGSGLSIQSNKLTLGKDVNGRYLFSYHRLSAQSKESKTICIKASLDQRKHEGRRGFLKLLNVGVGLPVLLGGGKAYADEQGPSSSRMSYSRFLEYLDKGRVKKVDLFENGTSAVVEAVSPELGNRVQRVRVQFPGLSQELLQKFREKNIDFAAHNGQEETGSPLANLIGNLAFPLILIGGLFLLSRRSGGMGGPGGPGFPLAFGQSKAKFQMEPNTGVTFDDVAGVDEAKQDFMEVVEFLKKPERFTAVGARIPKGVLLVGPPGTGKTLLAKAIAGEAGVPFFSISGSEFVEMFVGVGASRVRDLFKKAKENAPCIVFVDEIDAVGRQRGTGIGGGNDEREQTLNQLLTEMDGFEGNTGIIVIAATNRVDILDSALLRPGRFDRQVTVDVPDIRGRTEILKVHASNKKFDADVSLEVIAMRTPGFSGADLANLLNEAAILAGRRGKTAISSKEIDDSIDRIVAGMEGTVMTDGKSKSLVAYHEVGHAICGTLTPGHDAVQKVTLVPRGQARGLTWFIPNDDPTLISKQQLFARIVGGLGGRAAEEIIFGEPEVTTGAAGDLQQITSLAKQMVTTFGMSDIGPWSLMESSAQSGDVIMRMMARNSMSEKLAEDIDAAVKRLSDEAYEIALSQIRSNREAIDKIVEVLLEKETMSGDEFRALLSEFVEIPAENRVPPSTPSPVVV

SEQ ID NO: 23112 - protein, 698 aa, Glycine max
  unsure (1)..(698): unsure at all Xaa locations
MAASSACLVGNGLSTRGNRITLKKDFNGRRYLYSSWRFSLLNNNKASKVSIKASLEQRQEEGRRGFLKLLLGNLGVGLPALLGSGKAYADEQGVSSSRMSYSRFLEYLDKDRVKKVDLYDNGNTAVVEAVSPELGNRSQYVRVQLPGLNQELLQKFREKNIDFAAHSPQEESGSLLANLIGNLAFPLLLIGGLFLLSRRSGGMGGPGGPGFPLAFGQSKAKFQMEPNXPGVPFXDDVAXGVDEAQQDFMEVVEFLKKPERFTAVGARIPKGVLLVGPPGTGKTLLAKAIAGEAGVPFFSISGSEFVEMFVGVGASRVRDLFKKAKENAPCIVFVDEIDAVGRQRGTGIGGGNDEREQTLNQLLTEMDGFEGNTGIIVVAATNRADILDSALLRPGRFDRQVTVDVPDIRGRTEILKVHASNKKFDADVSLEVIAMRTPGFSGADLANLLNEAAILAGRRGKTAISSKEIDDSIDRIVAGMEGTVMTDGKSKSLVAYHEVGHAICGTLTPGHDAVQKVTLVPRGQARGLTWFIPNDDPTLISKQQLFARIVGGLGGRAAEEIIFGEPEVTTGAAGDLQQITSLAKQMVTTFGMSDIGPWSLMEPSAQGGDVIMRMMARNSMSERLAEDIDAAIKRISDEAYEIALEHIRNNREAIDKIVEVLLEKETLSGDEFRAILSEFVEIPAENRVAPSTPVPATV

SEQ ID NO: 23113 - protein, 690 aa, Glycine max
MAAPLACLVGSGLSIQSNKLTLGKDVNGRYLFSYHRLSAQSKESKTICIKASLDQRKHEGRRGFLKLLNVGVGLPVLLGGGKAYADEQGPSSSRMSYSRFLEYLDKGRVKKVDLFENGTSAVVEAVSPELGNRVQRVRVQFPGLSQELLQKFREKNIDFAAHNGQEETGSPLANLIGNLAFPLILIGGLFLLSRRSSGGMGGPGGGFPLAFGQSKAKFQMEPNTGVTFDDVAGVDEAKQDFMEVVEFLKKPERFTAVGARIPKGVLLVGPPGTGKTLLAKAIAGEAGVPFFSISGSEFVEMFVGVGASRVRDLFRKAKENAPCIVFVDEIDAVGRQRGTGIGGGNDEREQTLNQLLTEMDGFEGNTGIIVIAATNRVDILDSALLRPGRFDRQVTVDVPDIRGRTEILKVHGSNKKFEADVSLEVIAMRTPGFSGADLANLLNEAAILAGRRGKTAISSKEIDDSIDRIVAGMEGTVMTDGKSKSLVAYHEVGHAICGTLTPGHDPVQKVTLVPRGQARGLTWFIPADDPTLISKQQLFARIVGGLGGRAAEEVIFGEPEVTTGAAGDLQQITSLAKQMVTTFGMSDIGPWSLMDSSAQSDVIMRMMARNSMSEKLAEDIDAAVKRLSDEAYEIALSQIRSNREAIDKIVEVLLEKETMSGDEFRALLSEFVEIPAENRVPPSTPSPVVV

SEQ ID NO: 23114 - protein, 717 aa, Glycine max
  unsure (1)..(717): unsure at all Xaa locations
MSLLLFQFLHSLSQVLCFEVLFFIRMAAPLACLVGSGLSIQSNKLTLGKDVNGRYLFSYHRLSAQSKEXTKTICIKASLDQRKHEGRRGFLKLXXNVGVGFPVLLGGGKAYGGGQGAYSSRMSYXVFLKYSNKGTLNKIGSFIEKQRIEGEEFRVLLGEMVKIAGDKRVPLSIAYHMLFEXPILHXKGLTPGYXRISSIADIIGKLAFPLFILVGLFLLSTQSWGGMGCPGGGFPLAFGQSKAKFQMEPNTGVTFDDVAGVDEAKQDFMEVVEFLKKPERFTAVGARIPKGVLLVGPPGTGKTLLAKAIAGEAGVPFFSISGSEFVEMFVGVGASRVRDLFRKAKENAPCIVFVDEIDAVGRQRGTGIGGGNDEREQTLNQLLTEMDGFEGNTGIIVIAATNRVDILDSALLRPGRFDRQVTVDVPDIRGRTEILKVHGSNKKFEADVSLEVIAMRTPGFSGADLANLLNEAAILAGRRGKTAISSKEIDDSIDRIVAGMEGTVMTDGKSKSLVAYHEVGHAICGTLTPGHDPVQKVTLVPRGQARGLTWFIPADDPTLISKQQLFARIVGGLGGRAAEEVIFGESEVTTGAVGDLQQITSLAKQMVTTFGMSDIGPWSLMDSSAQSDVIMRMMARNSMSEKLAEDIDAAVKRLSDEAYEIALSQIRSNREAIDKIVEVLLETETMSGDEFRALLSEFVEIPAENRVPPSTPSPVVV

SEQ ID NO: 23115 - protein, 693 aa, Capsicum annuum
MATSSVCIAGNGLSTHKTQKVFKKDVYGRKILYSSNLPSSGKTSRVVVKASLQQRPDEGRRGFLKLLLGNVGLGAPALLGNGKAYADEQGVSNSRMSYSIFSEYLDKDRVQKVDLFENGTIAIVEAVSPELGNRVQRVRVQLPGLSQELLQKFREKNIDFAAHNAQEDSGSLIFNLIGNLAFPLILIGGLFLLSRRSNGGMGGPGGPGNPLAFGQSKAKFQMEPNTGVTFDDVAGVDEAKQDFMEVVEFLKKPERFTAVGARIPKGVLLVGPPGTGKTLLAKAIAGEAGVPFFSISGSEFVEMFVGVGASRVRDLFKKAKENAPCIVFVDEIDAVGRQRGTGIGGGNDEREQTLNQLLTEMDGFEGNTGIIVVAATNRADILDSALLRPGRFDRQVSVDVPDIKGRTEILKVHAGNKKFDSDVSLEVIAMRTPGFSGADLANLLSEAAILAGRRGKTAIASKEIDDSIDRIVAGMEGTVMTDGKSKSLVAYHEVGHAICGTLTPGHDPVQKVTLIPRGQAKGLTWFIPADDPTLISKQQLFARIVGGLGGRAAEEVIFGAPEVTTGAAGDLQQITSLAKQMVVTFGMSELGPWSLMDASAQSGDVIMRMMARNSMSEKLAEDIDAAVKRLSDSAYEIALSQIRSNREAIDKIVEVLLEQETMTGDEFRAILSEFVEIPAENRVPAAVPTPAAV

SEQ ID NO: 23116 - protein, 693 aa, Nicotiana tabacum
MATSSVCIAGNSLSTHRRQKVFRKDIYGRKILFSSNLPSSSKTSRIAVKASLQQRPDEGRRGFLKLLLGNVGLGVPALLGDGKAYADEQGVSNSRMSYSRFLEYLDKDRVQKVDLFENGTIAIVEAISPELGNRVQRVRVQLPGLSQELLQKLREKNIDFAAHNAQEDSGSFLFNLIGNLAFPLILIGGLFLLSRRSPGGMGGPGGPGNPLAFGQSKAKFQMEPNTGVTFDDVAGVDEAKQDFMEVVEFLKKPERFTAVGARIPKGVLLVGPPGTGKTLLAKAIAGEAGVPFFSISGSEFVEMFVGVGASRVRDLFKKAKENAPCIVFVDEIDAVGRQRGTGIGGGNDEREQTLNQLLTEMDGFEGNTGIIVVAATNRADILDSALLRPGRFDRQVSVDVPDIKGRTEILKVHAGNKKFDSDVSLEVIAMRTPGFSGADLANLLNEAAILAGRRGKTAIASKEIDDSIDRIVAGMEGTVMTDGKSKSLVAYHEVGHAICGTLTPGHDAVQKVTLIPRGQAKGLTWFIPADDPTLISKQQLFARIVGGLGGRAAEEVIFGEPEVTTGAAGDLQQITGLAKQMVVTFGMSELGPWSLMDSSAQSGDVIMRMMARNSMSEKLAEDIDGAVKRLSDSAYEIALTHIRNNREAIDKIVEVLLEKETMTGDEFRAILSEFVEIPAENRVAPVVPTPATV

SEQ ID NO: 23117 - protein, 413 aa, Solanum tuberosum
MATAMVLDPKPAEKLPATRPETSITDVPSDGEDDLYARLKSLQRQLEFIEIQEEYVKDELKNLRREHLRAQEEVKRIQSVPLVIGQFMEMIDQNNAIVGSTTGSNYYVRILSTINRELLKPSASVGLDRHSNALVDVLPPEADSSISLLSQSEKPDVTYNDIGGCDIQKQEIREAVELPLTHHELYKQIGIDPPRGVLLYGPPGTGKTMLAKAVAHHTTAAFIRVVGSEFVQKYLGEGPRMVRDVFRLAKENAPAIIFIDEVDAIATARFDAQTGADREVQRILMELLNQMDGFDQTVNVKVIMATNRADTLDPALLRPGRLDRKIEFPLPDRRQKRLVFQVCTAKMNLGDEVDLEDYVSRPDKISAAEITAICQEAGMHAVRKNRYVILPKDFEKGYRTNVKKPDTDFEFYK

SEQ ID NO: 23118 - protein, 398 aa, Solanum tuberosum
MATEEDAVRRRTALADYRKKLLQHKELDARVRTVRENLRATKKEYAKTEDDLKSLQSVGQIIGEVLRPLDNERLIVKASSGPRYVVGCRSKVDKEKLTSGTRVVLDMTTLTIMRALPREVDPVVYNMLHEDPGNISYSAVGGLSDQIRELRESIELPLMNPELFLRVGIKPPKGVLLYGPPGTGKTLLARAIASNIDANFLKVVSSAIIDKYIGESARLIREMFNYARDHQPCIIFMDEIDAIGGRRFSEGTSADREIQRTLMELLNQLDGFDQLGKVKMIMATNRPDVLDPALLRPGRLDRKIEIPLPNEQSRMEILKIHAAGIAKHGEIDYEAAIKLAEGFNGADMRNVCTEAGMFAIRAERDYVIHEDFMKAVRKLNEAKKLESSAHYSADFGKE

SEQ ID NO: 23119 - protein, 890 aa, Mesostigma viride
MQQNHMSLSNMIKEVKEVFFHVPALLIPTRYREIYREIDRAPKLLEQSFYTIFIKVWNITEKVTVTDVFYYSSVEDPLGLQSPRHSRWAQNTDEEQRKQARIIIQSVYKPNSFIRITSNKFTRVLITSLFVLTYFQSNGVFQSFPYFESQINGFLFKKMNNINQLEINSTNTCIIKITDLLTHQKSKELLGNSLPTNSILRWKMHSKISDIKTIFNMPEKWIYLPLGLGLENSEQIFSYRNFDICNLTKNSSNIMKIKNNRTILDPKIDKYPLVLKNKENILFFHKLPIQFFLFPYIVLRIWLAPVFVLWWSYQFNSEEKENIKNNLKNIHDIEISTIQKFVAKAITFRDIGGMESLKQELATVAFLLKQKNYSNSYPMGYLFAGPPGTGKTLMAKAMSYEAETPYLYVEGSQFRCREEGVANARVDDLFKQIQNISPCILYIDEIDSIAERREEANKQLEQLKTIGDSIEGSNINIDQKPSDTVLMQFLIYMDGYKKRNDLIIIGATNRIETLDDAIMRPGRFDRQIVFSPPFFEERKDILRIFLRNTKALVDDTTKTMMAERSIGLNGCDLRLLADNILLLSALESRNQQKTIPVINEDTFDRALERVSRIRHIISNYELAFGKYDFYRTAYHEAGIALIHTLLPECRPVYSVKLFPKPLNDRYLEIERENLKVPSSDIISTNNIDYFVQKIVGLLAGRAAESILFDFYPGQISTYLNKTYDPNIQGAYNIAHHIVEFGLLDSVTGVIHYLNSENENNIKDPFVTKINDLIQNKVTLKTNRELRKYSQAASILDFNEFWYEQDYPWQFDFIKKQYIYSNESSRNLDMEIVSILHTLFQYTYDFLKSNEQLLDHLASLVLKNKSISQKEIHLVVNSYGIKIPTKTWKAW

SEQ ID NO: 23120 - protein, 844 aa, Dictyostelium discoideum
MSSSSNILKTTKILFSTASNNATTKKSRLISYLNRSLINNNENNKIPQSIIDNNNNSNRNILKCNIYSSFNNNKIENNKLFISEIQSNFKRFSSSSPPPKSPKDEDNEKKFENEKETTVKQDKNKNDVENKKENENEKVKDEKEKDEKEKEEKEEEKENKEEKENEEENKDKEDKKKGNQPDSPISSFFTPRAAAILAIVAANILIFTFIKPQNDEIDYQTFRNKILPNAEIHSILLTNTTAEVVEKVQPEVGGSGIGSLKVHTITIISPEDFQRKLQEDQDALGIPLNKQVFATFNHTNKILRELVAISPTLLMIGLLIYFSRGINSSLTKGASSLFKSKSKAVKATSTTTFKDVAGMDEAKEEIMEFVSFLKDPSRYKKLGARIPKGAILSGPPGTGKTLLAKATAGEAGVNFYTISGSDFIEMFVGVGPSRVRDLFKEARANTPCIVFIDEIDAVGRARSRGGFHNDERENTLNQLLVEMDGFSSTSGVVVFAGTNRSDVLDPALLRPGRFDRQIYVGKPDIKGRKDIFMVHLKNIKLDGEMEEIAKKLATLTPGFSGADIANVCNEGALVAARKDATSANFDHFEEAIERVLVGLKRENRVLSPEERTIVAHHEAGHAVVGWFLEHTDPLLKVSIVPRGSGTLGFAQYQPKDQYLYTREQLFDRICVSLGGRIAESIIFDRISTGAMDDLDKVTKMASASVVNYGMSEKVGVASFRKEGDDITVVKPYSQATARMIDEEIRRMVNDAYSKTTQLLHEKKELLIKLATILLEKEVIQRDDLRTILGPRPYGEQTTWAELTGETENEKIKEAELSTESQQKEVDSIEPQQPKEENSDENLKK

SEQ ID NO: 23121 - protein, 729 aa, Oryza sativa
  unsure (1)..(729): unsure at all Xaa locations
PSERRRKNQSAATLLVGVGLFIHSTPSSLPFLVRPTPPPSPLHAPLRSTQXAKMAPTSMSLAAKTPLPFSTLPSSGVAQRPVSVTASLEHKTNDARRKFLKLALGNLGVGLPTLLGAKRALAEEQGVSSSRMSYSRFLEYLDKDRVKKVDLFENGTIAIVEAISPELGNRVQRVRVQLPGLSQELLQKLREKNIDFAAHSNQEDSGSLLFNLIGNLAFPLILIGGLFLLSRRAQGGLGGPNGPGFPLGFGQSRAKFQMEPNTGVTFDDVAGVDEAKQDFMEVVEFLKKPERFTAVGARIPKGVLLVGPPGTGKTLLAKAIAGEAGVPFFSISGSEFVEMFVGVGASRVRDLFKKAKENAPCIVFVDEIDAVGRQRGTGIGGGNDEREQTLNQLLTEMDGFEGNTGIIVIAATNRADILDSALLRPGRFDRQVSVDVPDVRGRTEILKVHGSNKKFDTDVSLEVIAMRTPGFSGADLANLLNEAAILAGRRGRTAISSKEIDDSIDRIVAGMEGTVMTDGKSKSLVAYHEVGHAICGTLTPGHDPVQKVTLIPRGQARGLTWFIPMDDPTLISRQQLFARIVGGLGGRAAEEIIFGEPEVTTGAAGDLQQITGLAKQMVVTFGMSDIGPWSLMDSGAQSGDVIMRMMARNSMSEKLAEDIDTAVKRLSDEAYEIALSQIRSNREAMDKIVEVLLEKETLSGDEFRAILSEFTEIPVENRVPPATPAALPA

SEQ ID NO: 23122 - protein, 735 aa, Oryza sativa
  unsure (1)..(735): unsure at all Xaa locations
MAPTSMSLAAKTPLPFSTLPSSGVAQRPVSVTASLEHKTNDARRKFLKLALGNLGVGLPTLLGAKRALAEEQGVSSSRMSYSRFLEYLDKDRVKKVDLFENGTIAIVEAISPELGNRVQRVRVQLPGLSQELLQKLREKNIDFAAHSNQEDSGSLLFNLIGNLAFPLILIGGLFLLSRRAQGGLGGPNGPGFPLGFGQSRAKFQMEPNTGVTFDDVAGVDEAKQDFMEVVEFLKKPERFTAVGARIPKGVLLVGPPGTGKTLLAKAIAGEAGVPFFSISGSEFVEMFVGVGASRVRDLFKKXXADILDSALLRPGRFDRQVSVDVPDVRGRTEILKVHGSNKKFDTDVSLEVIAMRTPGFSGADLANLLNEAAILAGRRGRTAISSKEIDDSIDRIVAGMEGTVMTDGKSKSLVAYHEVGHAICGTLTPGHDPVQKVTLIPRGQARGLTWFIPMDDPTLISRQQLFARIVGGLGGRAAEEIIFGEPEVTTGAAGDLQQITGLAKQMVVTFGMSDIGPWSLMDSGAQSGDVIMRMMARNSMSEKLAEDIDTAVKRLSDEAYEIALSQIRSNREAMDKIVEVLLEKETLSGDEFRAILSEFTEIPVENRATWIQILDLIWMLALTRGDFVNLKIYRSSLPEVLIRVRLEVAKRAARPGTARARVRHGPFRHGPLGTADETGRAVSAHVPSRRPKHGPWMAGPCPCRHGTPAAHGPFGARRPVKAGRQPTVHAQCFFF

SEQ ID NO: 23123 - protein, 588 aa, Oryza sativa
  unsure (1)..(588): unsure at all Xaa locations
MAPTSMSLAAKTPLPFSTLPSSGVAQRPVSVTASLEHKTNDARRKFLKLALGNLGVGLPTLLGAKRALAEEQGVSSSRMSYSRFLEYLDKDRVKKVDLFENGTIAIVEAISPELGNRVQRVRVQLPGLSQELLQKLREKNIDFAAHSNQEDSGSLLFNLIGNLAFPLILIGGLFLLSRRAQGGLGGPNGPGFPLGFGQSRAKFQMEPNTGVTFDDVAGVDEAKQDFMEVVEFLKKPERFTAVGARIPKGVLLVGPPGTGKTLLAKAIAGEAGVPFFSISGSEFVEMFVGVGASRVRDLFKKAKENAPCIXNKKFDTDVSLEVIAMRTPGFSGADLANLLNEAAILAGRRGRTAISSKEIDDSIDRIVAGMEGTVMTDGKSKSLVAYHEVGHAICGTLTPGHDPVQKVTLIPRGQARGLTWFIPMDDPTLISRQQLFARIVGGLGGRAAEEIIFGEPEVTTGAAGDLQQITGLAKQMVVTFGMSDIGPWSLMDSGAQSGDVIMRMMARNSMSEKLAEDIDTAVKRLSDEAYEIALSQIRSNREAMDKIVEVLLEKETLSGDEFRAILSEFTEIPVENRVPPATPAALPA

SEQ ID NO: 23124 - protein, 725 aa, Triticum aestivum
  unsure (1)..(725): unsure at all Xaa locations
RARPPSSRHPRATAPHRGTQTHHPEAEPEEEEKSAAARPSPGRPVSPARYLYAPLGSAHPSPLTIAPFPPRSSAPAPLQLVSAPKHGAVHEARLXXGVLPFGALPSSGGSQRPASVTASLEHQRSDSWRLLLKLAVCGVCRAALLPANMALADDPRVSSSGISXWSFREXLDKDSVQKVHGLEEGNIAIVEDIRPEVRGDVHGDRLRLPGLXLSKFTEICVDNRVDQAAQXTGGGLGSGLLLGLEHLLLLVGDXMSLGREXXFDNVAGVDEAKHAFLEVVENQKARERFTAVGARIPKGVLLVGPPGTGKTLLAKAIAGEAGVPFFSISGSEFVEMFVGVGASRVRDLFKKAKENAPCIVFVDEIDAVGRQRGTGIGGGNDEREQTLNQLLTEMDGFEGNTGIIVVAATNRADILDSALLRPGRFDRQVSVDVPDVRGRTEILKVHGSNKKFDADVSLEVIAMRTPGFSGADLANLLNEAAILAGRRGRTGISSKEIDDSIDRIVAGMEGTVMTDGKSKSLVAYHEVGHAVCGTLTPGHDPVQKVTLVPRGQARGLTWFIPMDDPTLISRQQLFARIVGGLGGRAAEEIIFGDSEVTTGAAGDLQQITGLAKQMVVTFGMSDIGPWSLMDAAQSGDVIMRMMARNSMSEKLALDIDSAVKQLSDQAYQIALQQVRDNRVAMDKIVEVLLEKETLSGDEFRAILSEFTEIPVENRVPPTPQAAVPV

SEQ ID NO: 23125 - protein, 463 aa, Triticum aestivum
  unsure (1)..(463): unsure at all Xaa locations
TRICGRQLLVGQSVPTPLLIRSARLGSPLSPRNRPLPPSLLRPGPDPARLSKQTWRHPXVLQRKVLPFGALPSSGVAQRPVSVTASLEHKPNDSKRKLLKLALGGVGLPALLTANKALADDQGVSSSRMSYSRFLEYLDKDRVKKVDLFENGTIAIVEAISPELGNRVQRVRVQLPGLSQELLQKLREKNIDFAAHNQQEDSGNLLFNLIGNLAFPLILIGGLFLLSRRGGSGGMGGPGGPGFPLGFGQSKAKFQMEPNTGVTFDDVAGVDEAKQDFMEVVEFLKKPERFTAVGARIPXGVLLVGPPGTGKTLLAKAIAGEAGVPFFSISGSEFVEMFVGVGASRVRDLFKKAKENAPCIVFVDEIDAVGRQRGTGIGGGNDEREQTLNQLLTEMDGFEGNTGIIVVAATNRADILDSALLRPGRFDRQVSVDVPDVRRRTNQXSXGEAELTASGSAQTPNSR

SEQ ID NO: 23126 - protein, 1157 aa, Pichia pastoris
MNSIDAVVRYSPLRNNLCNLPSAITTMLFSADFNIQQIIVELSWVPHQRAAQRRIAYCGWAGGITKTSSSNPVIEIDRSLASAIDLQENVNVTVNVHIDAVKAITVELEPVTSNDWEIVETHAQVLETYLLNQTRCVYPNQVLVVYPTPQTTARLLVKKIEPEVSTFAQLFNDTEVQIAPKVQKRPSISSVRSDSSGHRIRRVRSSTSTATGRRSVTNNGEVLPSMLRRSITLPNNTYAHVNDSKSGGYKVYCNLNELIPALQNAHFVSVSVLVGPGTPDRTGLTSSKIKQLNDSIDQAAQTQTNAAGSSHPPESSYTETGKVIAELVHDSKSPKGNVGLSELLACSLGIENTVGNLISLEQARKPLIKKPTVLVLHKYTTVSPASLDRVTIKHATEEQKRVQNKKERDTLLTQLMQLLSPLLDSCTFTNCVKLPKIGTLLPNGGLLQFKRIKSGWTTPLGKDNVSLEIGEEILRPESFSPSYDLLPDRKTHVRTQSDQYPTAQENLIESLSKIASGGSLLFGTSGSGKSLVISQVAQIVTNKGHFVKLLNCDKIMSESYNNLRGIFEDIFSEVSWKAPSLLILEDLDSLIPAEQEHSDSSQSRQLSEYFISKLSAQTINRDITILASSKSKESLNSLIFTTHLIEHDFQLRAPDKEARKQILQSYLDTLNVFCSEGELLNNIAVETEGYLPKDLKVLCDRAYHDLISRDILADSDSELDIEESSTPILNGSVGDIANKQSEIENGISGLELTNNSSSTIAVDKHGATIQKDNFDSALSGYIPQSLRGVKLQKSDVRWDDIGGLRDAKSILLETLEWPTKYAPIFSSCPLRLRSGILLYGYPGCGKTLLASAVAAQCGLNFISIKGPEILNKYIGPSEQSVRELFERAQAAKPCILFFDEFDSIAPKRGHDSTGVTDRVVNQMLTQMDGAEGLDGVYVLAATSRPDLIDSALLRPGRLDKSVICDMPDFDDRLDILQSVTRNMNVSKSVNLSSVAGECSGFSGADLQALAYNAYLKAVHEKLTKDESMAMAGEMDDNDDKKRMVECFQFSGNTEKKSLIELKPSDRATVIKKLEHLYQGNGNHAEGETKSKLATTAANSVIITSKDFEDSLSETKQSISQSEKRKLEAIYQQFISGRDGNMPDGTASNEIGARSTLM

SEQ ID NO: 23127 - protein, 611 aa, Desulfitobacterium hafniense
MKKMNEKPTPKKPLIYYSLIALLILLLLNAFVFPHLLKRQVTQVDYGSFLSYLESGTISEVEVQDNQIAFMTKDSTGKETIFVTGAMADPELVNRLKAAGVDKYSQVIPKENSPLMNILLTWILPMILLFGLWMLLGNLMQRKMGGGMNAMTFGKSNAKIYVQAQTGKTFADVAGQDEAKEALTEIVDFLHDPSRYAAIGADLPKGALLVGPPGTGKTLLAKAVAGEAKVPFFSISGSEFVEMFVGMGAAKVRDLFKQANEKAPCIVFIDEIDTIGKKRDGGSFGGGNDEREQTLNQLLSEMDGFDGKKGVVILAATNRPESLDKALLRPGRFDRRIPVELPDLAGREAILRVHGQKVKMDSPIDFKAIARATAGASGAELANIINEGALRAVRCGRSRVNQSDLEESVEVVIAGYQRKGAVISHREKEIIAFHEIGHALVATKQTDSAPVHKITIIPRTSGALGYTMQVEEDERVLMSKEEAFNKITTFTGGRAAEELIFGTYTSGASNDIEQATKIARAMVTRLGMSKNFDMMALETVNNPYLGGDTSLMCSPETAARIDEEILSIIKSAHKKAFEILKENIEKLHELARYLLEKETITGEEFMAVLSR

SEQ ID NO: 23128 - protein, 314 aa, Desulfitobacterium hafniense
DESIVPSPPFPGSDFVEMFVGVGASRVRDMFEQAKKHAPCIIFIDEIDAVGRHRGAGLGGGHDEREQTLNQLLVEMDGFEGGEGVIVIAATNRPDVLDPALLRPGRFDRQVVVGLPDVKGREQILRVHMRKLPLHEDVEPMTIARGTPGFSGADLANLCNEAALFAARENAKEVRMEHFDKARDKILMGAERRSMAMSEDEKKLTAYHEAGHAIVGRVVPEHDPVYKVTIIPRGRALGVTMYLPEGDKYSMNRVAIESQLCSLYGGRVAEELIFGVDKVTTGASNDIERATKMARNMVTKWGLSDEMGPIAYGE

SEQ ID NO: 23129 - protein, 493 aa, Desulfitobacterium hafniense
MGLAKDIAMGVGVGLFLYLWVSGYNVLPIGLLVLLGVAFWKFMPRSMVGGSEKGVRISGSTVDFEDIGGQNAAKKELQEALDFLLYSERMRELGIRPLKGILLSGPPGTGKTLLAKAAARYTDSVYLAISGSEFVEMYAGVGAERVRKLFKKARESAKKEKKDRAIIFIDEMDILGAKRGSNVSHHEYDQTLNQLLVEMDGLGNSEQGTQILLIAATNRAEALDPALLRPGRFDRLVKVDLPDKEGRLAILKIHTKNKPLASCVDLEQIAQETYNFSGAHLESVTNEAAVFALRDDAREVNMFHFREAVEKVLLGEKLDRKPTDEELQRVAIHEGGHALLAEFVRPHSVSQISIRSRGNALGYVRHYPKDDLYLYTQAMIEEQIMVALAGAIAEETILGTRSTGAAGDYEQALHMVEKMLASGMSTLGVVDVVKLGADQRQQVTREILAELEERTCQVILDKKGILERVVQVLKTEEVLNGERLRLLIEEEAA

SEQ ID NO: 23130 - protein, 631 aa, Guillardia theta
MKISWKNILLTLIPLGLISFLVWQGFNNTTNPQFTKNIASSRMTYGRFLEYLDLGWVKKVDLYDEGHTAIVEAIGPELGNRIQRIRVELPATAPELITKLRKANVDLDAHATNDSTPAWSLIGNLIFPILLIAGLAFLFRRSSNLPGGPGQAMNFGKSKARFQMEAKTGVTFNDVAGVDEAKEEFEEVVSFLKKPERFTAVGAKIPKGVLLVGPPGTGKTLLAKAIAGEAGVPFFSISGSEFVEMFVGVGASRVRDLFKKAKENSPCIVFIDEIDAVGRQRGTGIGGGNDEREQTLNQLLTEMDGFEGNTGIIIIAATNRVDVLDAALLRPGRFDRQVTVDVPDVKGRLEILNVHARNKKLDLSISLELIAKRTPGFSGADLANLLNEAAILTARRRKKQITISEIDASIDRVIAGMEGKALVDSKTKRLIAYHEVGHAIIGTLLKHHDPVQKVTLVPRGQAKGLTWFTPSEDQSLISRSQILARIMGALGGRAAEEVVFGLPEVTTGAGNDLQQVTSMARQMVTRFGMSNIGPLSLESQNSDPFLGRTMGSSSQYSEDIASRIDMQVRAIIQHCHTETVQIIKDNRVVIDKLVDLLIEKETIDGDEFRQIVGDFTSLPEKIDYKSQLKST

SEQ ID NO: 23131 - protein, 806 aa, Plasmodium falciparum
MEDNTDKKALVDENNGENKVPKKKNLSRLIVEEATNDDNSVVALNTKRMEELNFFRGDTIIIKGKKRHSTICIILNDNDLDEGKIRINKVARKNLRVCLGDVVYVKSCPEIPYGKKIQVLPIDDTIEGLAKDTLFEIFLKPYFNESYRPVKKGDLFLVRGGFMSVEFKVVEVDPDDFCIVSPDTVIYYEGDPIKRDDEEKLDEIGYDDIGGCKKQLAQIREMIELPLRHPGLFKTLGVKPPRGVLLYGPPGSGKTCIARAVANETGAFFFLINGPEVMSKMAGEAEANLRRAFEEATNGEVERRVVSQLLTLMDGIKSRGQVVVIAATNRQNSIDPALRRFGRFDREIDIGVPDDNGRFEILRIHTKNMKLSPDVKLEELASNTHGFVGADLAQLCTEAALTCIREKMDVIDLEDEIIDKEVLESMCVTQDHFNMALGTCNPSSLRETVVEVPNVKWDDIGGLDEVKSTLREMILYPIDHPDKFEKFGMSPSRGVLFYGPPGCGKTLLAKAVASECSANFVSIKGPELLTMWFGESEANVREVFDKARAAAPCVLFFDELDSIGTQRGSSLGDGSGAGDRVMNQLLTEIDGVGPKKNLFFIGATNRPELLDEALLRPGRLDQLIYIPLPDLGARISILTAILRKCPVAENVPIDFLAQKTAGFSGADLAELCQRAARAAIRDAIDAEEMNKKSKLELSNKKENEQNETNENDVHNKTEQQANDQQKNDDDNIKYEITRHHFKEGLAGARRSVSQADLIKYDNFRIKFDPLYKTKTGGTGDDFIIDWPDEDNNDDTPAYVVDEDLYS

SEQ ID NO: 23132 - protein, 637 aa, Prochlorococcus marinus subsp. pastoris str. CCMP1378
MNQKLKTIILWALPIILVIALSYQFLSTSNIDSLKSNGTTIAPKNSAVARVSYGRFLDYINSGRVTSVDIFDGGRNAVIETIDSDLDNKVQRLRVDLPGLTPELITNLKNEGISFDVHPVKTTPPALGILGNLLFPAILIGGLILLARRSNGMPGGPGQAMQFGKSKARFAMDADTGVVFDDVAGVNEAKEDLEEVVTFLKKPEKFTSVGARIPKGVLLVGPPGTGKTLLAKAIAGEAGVPFFSLAGSEFVEMFVGVGASRVRDLFKKAKENSPCLIFIDEIDAVGRQRGAGIGGGNDEREQTLNQLLTEMDGFEGNSGIIIIAATNRPDVLDSALMRPGRFDRQVTVDAPDIKGRLSILEVHSKNKTLQEDLTLESIARRTPGFTGADLANLLNEAAILTARRRKESIGILEIDDSVDRIVAGMEGSPLTDGRSKRLIAYHEVGHAIIGTLVKAHDPVQKVTVIPRGQAKGLTWFTPDDDQSLISRANLKARIMGALGGRAAEDVVFGKGEITTGAGGDFQQVASMARQMVTRFGMSELGPIALEGGNQEVFVGRDLMTRSEVSDSISKQIDESVRVMVKDCYKETYSIISKNREAMDKIVDLLIEKETLDGEEFVKILSKFTQIPEKERTPQILN

SEQ ID NO: 23133 - protein, 415 aa, Encephalitozoon cuniculi
MNGQKQENIIEEKDVGFILSYGRNYYADGIVEKEAEIRRLFEQISLKLGTREVETGLAPPMCWDLLGDRNRIQSEPNLQVARVCKVLDGYQEPRYMIGIKMIAKFIVGKGKRVDSSLIQEGMRVGVDRNKYQIILPLPRKIDASVTLMQVEERPDVTYHDIGGCKEEIEKIREVVEAPLLNPERFVALGIDPPKGVLLYGPPGTGKTLLARAVANRTNACFIRVIGSELVQKYVGEGARMVREIFAMAKGKKACIIFFDEVDAFGGTRFDDDDDNEVQRTMLELINQLDGFDPRGNIKVLMATNRPDTLDPALLRPGRLDRKVEFGLPDLEGRTSILRIHAKTMSVDKDIRFDLIARLCNNATGAELRSVCTEAGMFAIRERRKIATEKDFLKAVDKVVKGYAKFSSTPRYLTYN

SEQ ID NO: 23134 - protein, 469 aa, Schistosoma japonicum
MAAYSLRPTSGGVVRKSGLGSGLFNFAQSPVRLIEKDKIGVRFSDVAGCEEAKLEIIEFVNFLRNPSKYEALGAKIPRGAILKGPPGTGKTLLAKATAGEANVPFLSVSGSEFLEMFVGVGPKRVRDMFASARDKAPCILFIDEIDAIGGKRSGTAFGHQERENTLNQLLVEMDGFTTQENVVVLAATNRIDILDPALLRPGRFDRQIYVSLPDIKGRASIFKIHLKPIKLADDTQLVARRMAARTPGFSGADIASVCNEAALIAAREDAHNVNLTHFDKAIDRVIAGLEKKSQVLQPEEKKTVAYHEAGHAVVGWFLEHCNPLLKVSIIPRGKALGYAQYQPRDIYLHTKDQMLDEMCLALGGRASEEVFFGKVGSGAVDDLQRVTRSAYSQIVQLGFSSKVGLLSFDLPQQGEMVLSKPYSEHTAQIIDEEVRQIVQSAYERTLALLTEKKQLVEKLALRLLDREQL

SEQ ID NO: 23135 - protein, 852 aa, Caenorhabditis elegans
MWRLYRKTPKQLRNSVESCFKSVNSRQFSVSSFSAVAKDDKSVLKQQEVLHLLAKDQRFEERFFNQVQQTIRYFASKPNDLKKFFRKEASTDNKESSSSSDKKDSKGNKGEDNNPFNQFPGGWQQIAVSVGILLALYAFMDYQSYREISWKEFYSDFLEAGLVERLEVVDKRWVRIVSSSGKYAGQTCYFNIGSVDSFERSLGAAQHHLQYDADRQIPVLYKSEFNFKREIPNLISVAFPLLFGYYIYRMLKGGGAAGGAGRAGGGGLGGMFGGFGQSTARVINREDIKVKFADVAGCEEAKIEIMEFVNFLKNPQQYKDLGAKIPKGAILTGPPGTGKTLLAKATAGEANVPFITVSGSEFLEMFVGVGPARVRDMFSMARKNSPCILFIDEIDAVGRKRGGKGGMGGHSEQENTLNQLLVEMDGFTTDESSVIVIAATNRVDILDSALLRPGRFDRQIYVPVPDIKGRASIFRVHLGPLRTSLDKTVLSRKLAAHTPGFSGADISNVCNEAALIAARDANHEISNKHFEQAIERVVAGMEKKTQVLQKEEKKTVAYHEAGHAIAGWFLQHADPLLKVSIIPRGKGLGYAQYLPKEQYLYSKDQLLDRMCMTLGGRVAEEIFFGRITTGAQDDLQKVTQMAYSQVVKFGMSEKVGPLSFETPAPGEMAFDKPYSEATAQLIDQEQFADLPEILDSGNLPICRKFSIPAICRFAGNFQFRQFANLPNCRKFSIPTICQFAGNFNFQKIADLPEKIVRDLVMNALRRTRDLLLEKRSDIERVALRLLEKEILNREDMIELVGKRPFVEKNTYEEMVSGTGGLDENVELPKGLENWNKESEKKKKDEEKKKNDE

SEQ ID NO: 23136 - protein, 628 aa, Nostoc punctiforme
MKFSWKVVVLWTLPALVIGFFFWQGAFAGAPTDMSKNAANTRMTYGRFLEYLDGDRVSSVDLYEGGRTAIIEARDPDIENRIQRWRVDLPVNAPELISKLKEKDISFDAHPMRNDGAIWGLLGNLVFPVLLITGLFFLFRRSSNLPGGPGQAMNFGKSKARFQMEAKTGVKFDDVAGIEEAKEELQEVVTFLKQPERFTAVGARIPKGVLLVGPPGTGKTLLAKAIAGEAGVPFFSISGSEFVEMFVGVGASRVRDLFKKAKDNAPCIIFIDEIDAVGRQRGAGIGGGNDEREQTLNQLLTEMDGFEGNTGIIIIAATNRPDVLDSALLRPGRFDRQVTVDAPDIKGRLEILEVHSRNKKLDPSVSLDAIARRTPGFTGADLANLLNEAAILTARRRKEAITLREIDDAVDRVVAGMEGTPLVDSKSKRLIAYHEIGHALVGTLLKDHDPVQKVTLIPRGQAQGLTWFTPNEEQGLISRSQLKARITGALGGRAAEEVIFGAAEVTTGAGGDLQQLSGMARQMVTRFGMSDLGPLSLESQQGEVFLGRDWTTRSEYSESIASRIDGQVRAIVEECYDNAKKIVRDHRTVTDRLVDLLIEKETIDGEEFRQIVAEYAEVPEKQQYVPQL

SEQ ID NO: 23137 - protein, 642 aa, Nostoc punctiforme
MTNLGKKALVKRQSSKRVAWFGAKALPAVGIAASLIMLPGIFGSTPVLAQKAESTSSSSSTSLNYGELIKKAKAGEVQKVELDETEQVARVYLKGQKENTPPQQVRLLAQNTELINILKDKNVEFGEISSANSRAAVGLLINLMWILPLLALMLLFLRRSTNASSQAMNFGKSKARFQMEAKTGVKFEDVAGVEEAKEDLEEVVTFLKQPERFTAVGARIPKGVLLIGPPGTGKTLLAKAIAGEAGVPFFSISGSEFVEMFVGVGASRVRDLFKKAKENAPCLIFIDEIDAVGRQRGAGIGGGNDEREQTLNQLLTEMDGFEGNTGIIIIAATNRPDVLDAALLRPGRFDRQVMVDAPDLKGRLEILKVHARNKKIDPSVSLEAIARRTPGFTGADLANLLNEAAILTARRRKEAVTILEIDAAVDRVVAGMEGTALVDSKSKRLIAYHEVGHALVGTLLKDHDPVQKVTLIPRGQALGLTWFTPNEEQGLVSRSQLKSRITATLGGRAAEEIVFGKPEVTTGASNDLQQVTGMARQMVTRFGMSELGPLSLENQSGEVFLGRDWMNKSDYSEEIAAKIDSQVREIVNNSYIKAKELLEENRIVLERLVDLLIEEETIEGDSFRQIVADNAQIADAQLAVPH

SEQ ID NO: 23138 - protein, 381 aa, Haemophilus influenzae Rd
MGRQRGAGLGGGHDEREQTLNQMLVEMDGFSGNDGVIVIAATNRPDVLDPALTRPGRFDRQVVVGLPDVKGREQILKVHMRKVSVAQDVDAMTLARGTPGYSGADLANLVNEAALFAARVNKRTVTMLEFEKAKDKINMGPERRTMIMTDKQKESTAYHEAGHAIVGYLVPEHDPVHKVTIIPRGRALGVTFFLPEGDQISISQKQLESKLSTLYAGRLAEDLIYGEENISTGASNDIKVATNIARNMVTQWGFSEKLGPILYTEDEGEVFLGRSMAKAKHMSDETAHSIDEEVRAIVNRNYARAREILIDNMDILHAMKDALVKYETIEEEQIKQLMNREPVTPPSGWGEPKTQQAAYANSTTNDTKPESAVENTDDFNV

SEQ ID NO: 23139 - protein, 703 aa, Plasmodium yoelii yoelii
MLLLRNIVVLDLKRSNFLYIKNIPDVKKLLNSKRYFSVLNTERLDRLKREIRYKPNDNFLILQFYKEANLHNPNEVIKHYENSSYIKNESTTKEYLKALVYTNKLKYTNLNNIKYDSEPNFYRRSMEDGNNNISGINNERSNIYETHNINIDPNYSNISRSGHTNNYNDKKNGTHSEVFSLQIDPKIPLKVSLINTNKKGLWGVLKSTIGFLILVAAASVYLEGVSQNVQKGIGVSNKKVVPVENVKVTLADVKGCDEVKQELQEIIDYLKNSDKFTKIGAKLPKGILLSGEPGTGKTLIARAIAGEANVPFIQASGSEFEEMFVGVGARRIRELFQTAKKHAPCIVFIDEIDAVGSKRSNRDNSAVRMTLNQLLVELDGFEQNEGIVVICATNFPQSLDKALVRPGRLDKTIVVPLPDINGRYEILKMYSNKIILSKDVDLNILARRTVGMTGADLKNILNIAAIKCSVEGKKSVDMNSIEQAFDRVVVGLQRKSPLSDEEKNITAYHEGGHTLVNFYTEGSDPVHKATIMPRGMSLGVTWKIPVTDKYSQKIKDIQSEIDVLMGGMVSEEIIFGKNNVTTGCSSDLQRATHIAQSLVMNYGVGINEENISMFLQDKKNISEDMKIKIDKSIQRILLDSYNRAKKVLNQHIDELHRVASALVEFETLTNDEIKLAMQGKNDQIRKNRELKQKEFNLKDNRVS

SEQ ID NO: 23140 - protein, 867 aa, Plasmodium yoelii yoelii
MYNYYKNFTSKIMNSNQYANDNYASSESDKHGEEDESALLSNGDRKYMNKSKSNQYDIDNGYYGYYDKIFGKRRNKKWNYFVIFFLGVCLGFAIWPFFMTIITYKLVYKDNYNNHNFPTSDNSNSLKPYVNDKNRKNDNPNNRTPPSEQGQKKPSPHFKPVKFDEIAGIDESKLELLEVVDFIKNRERYQEMGARMPKGVLLVGPPGSGKTMLARAVATEANVPYIYTSGPEFIEIYVGQGAKRIRQLFSHARSVAPSIVFIDEIDAIGGKRSPSASNGAGQKEHDQTLNQLLVEMDGFSNTVHIMVIGATNRIDTLDSALLRPGRFDRIVYVPLPDVSGRKKILEIYIKKIKSNLNANDIERMSRLTPGFSGADLENLVNEATILATRNKKSLVTINELFEARDKVSMGPERKSLKQSEHQRRITAYHEAGHAIVAYFLHPKTDPIHKATIISRGNALGYVEQIPVDDRHNYFKSQMEAKLAVCMGGRTAEEIVFGKSETSSGASSDISRATDIAYKMVTEWGMSDKLGPLNYKKRMGDGYSSMRLSAQTISAIETEVKTLVEKGKSISEEILRRHRKELDNLAFALLDKETLTGEEIKKIVDPNNSRDQSNRYQLLNKDPKNDDTQNDNNNSGKKPVRSDGKTNTSKNEKNEPNSHENEYNDSKEIDTNDKDNSNNMKSDEVNDLNKMENFVENEYIDTKDITTLSSENEIGILSKHFKNENKKLKKKYSRDPNTKNNNVLKMINSHKPSYYSKNENIDSENSINNSLDDFSDNIRNTRDSENNYDNNNTVKNTSELFTNDFSEENNNDNLSSVKTKDINYNNFQEIVDISPIKNVSEMKKQKTINFLYFYDFNNLKIIILFLQI

SEQ ID NO: 23141 - protein, 982 aa, Plasmodium yoelii yoelii
MYRSHIVEKNGQFLLKEKKYLKNILQSYRFEGFREKKNELFTINNDGKRCINSLVYTPNFNKISQNKNDGITITCDKKKYEQDIFSLNYFLDLIRNNKHLKNNSEFVKNVSNLFNRYAKLCCTHKMDYIQKNNEKVKHLKKSNETINKFLKKSFEAYNKINKIYDNNNNKIYDNNNDKIPDNNINSDVGHPNGLVNMKTEIDGKGKESNFVETLLKDIVKIYLSKIPKGFERFEKNNSNKNCNGNINNVQQEEEKPKKFDNNFFYLFILLLLCFLLFVDSNSLYNEITQNDFFYNYLSKGYVDKIKIINKDYVKAYLNSHGINKYHLKYVSFRVGNSDSFERKVELIQKEMNIKLDEIIEVQYVNEGNIIGEIKSYIPSILFFLFLIFIFQKITLKNVANSGMDKLFKFNKINPINKNNYKTDIKFSSVAGMKQAKEEIMEFVDFLKNPAKYQVLGAKIPKGALLCGAPGTGKTLLAKAVAGEANVPFFNISGSDFIEVFVGIGPSRVRELFAQARKHAPSIIFIDEIDAVGRKRSKGGFAGGGNDERENTLNQMLVEMDGFHTSNDQVVVLAGTNRIDILDPAITRPGRFDRIVNINKPDINERSEIFQVHLKNLKLHDSLDIKNISYILASLTPGFVGADIANVVNEGAIQCARRSHIQGVQIKDFELAIERVLGGLAKSTSLISPLEKKTISYHETGHALIGWFLEFADPVLKVSIIPRSNGALGYSQHLSEEIMLFSKEAIHDKIAVILGGRAAEELFIGKITTGAIDDLNKVTQLAYSYVSQYGMNKEIGLVSFQQNGGNNGSGEYAFYRPHSECLAHLIDNEARSLIESQYNRVKAILKKNEKHVHNLANLLYEKETISYHDIVKCVGERPYPIKSNYEKFVKANPYKMNLSTSMEEKSGEVDDPKNVRTQMGDSESAQKNAPQKGDNNNGSDSGNNNSGSDSGSNDKTGNDDSPITQNIGDRNKKDEKISNFNIR

SEQ ID NO: 23142 - protein, 638 aa, Prochlorococcus marinus str. MIT 9313
MNQRWRLIALWLLPIGVALLLAWQILGNGKLTGEQPSNATLAPRNAAVTRMSYGRFLDYVEAGRVTAVDIYDGGRNAVVEAVDPELDNRVQRLRVDLPGLAPELINTLKSEGISFDIHPARTTPPALGLLGNLLFPLLLIGGLILLARRSSSMPGGPGQAMQFGKTKARFAMEAETGVKFDDVAGVTEAKQDLEEVVTFLKKPERFTSVGAQIPRGVLLVGPPGTGKTLLAKAIAGEAGVPFFSLSGSEFVEMFVGVGASRVRDLFKRAKENTPCLIFIDEIDAVGRQRGAGIGGGNDEREQTLNQLLTEMDGFEGNSGIIIIAATNRPDVLDSALMRPGRFDRQVSVDAPDIKGRLAILEVHARDKKLEEDLSLKNVARRTPGFTGADLANLLNEAAILTARRRKKAISLDEIDDAVDRIIAGMEGHPLTDGRSKRLIAYHEVGHALIGTLVKDHDPVQKVTLIPRGQAQGLTWFAPDEEQMLVTRAQLKARIMGALGGRAAEDVVFGDAEITTGAGGDIQQVASMARQMVTRFGMSDLGPVSLESGNQEVFIGRDLMTRSEISDAISRQIDEAVREMVKHCYSETVKIVKQHREAMDRLVEILIEKETIDGEEFVSVVAEFTSVPEKERSIPILQS

SEQ ID NO: 23143 - protein, 637 aa, SYNECHOCOCCUS SP. WH 8102
MNQRWRLVALWLLPIGVVLLIGWQVISNGGLNSQNAGGTTVAPRNAAVARMSYGRFLDYVEAGRVTAVDIYDGGRNAVIEAVDPDLDNRVQRLRVDLPGLAPELVNTLKEEGISFDIHPPRTAPPALGLLGNLLFPLLLIGSLIFLARRNSGMPGGPGQAMQFGKSKARFMMEAETGVMFDDVAGVAEAKQELQEVVTFLKQPERFTSVGAQIPRGLLLVGPPGTGKTLLAKAIAGEAGVPFFSLSGSEFVEMFVGVGASRVRDLFKKAKENSPCLIFIDEIDAVGRQRGAGIGGGNDEREQTLNQLLTEMDGFEGNSGIIIIAATNRPDVLDSALMRPGRFDRQVTVDAPDIKGRLSILEVHCRNKKLEEELSLESIARRTPGFTGADLANLMNEAAILTARRRKEAIGLSEIDDAVDRIIAGMEGRPLTDGRSKRLIAYHEVGHALIGTLVKDHDPVQKVTLIPRGQAQGLTWFSPDEEQTLVTRSQLKARIMGALGGRAAEDVVFGHEEVTTGAGGDIQQVASMARQMVTRLGMSDLGPVALEGGGQEVFLGRDLMSRNDISESISQQIDAQVRQMVKRCYEETVDIVAANREAMDRLVELLIEKETMDGGEFAAVVAEFTQVPAKDRTVVTLD

SEQ ID NO: 23144 - protein, 657 aa, Bacillus halodurans
MNRIFRNTIFYLLIFLVIVGIVSFFTGDQTQTKQITFEEFTQHLEAGEITSLSIKPERDVYLVRGQLRGADEDEFFETYVLPTEQMAETISEAAGLQVIPADETSGWVTFFTGIIPFIIIFILFFFLLSQAQGGGSRVMNFGKSKAKMVNEDKKKAKFKDVAGADEEKQELVEVVEFLKDPRKFSAIGARIPKGVLLVGPPGTGKTLLARAVAGEAGVPFFSISGSDFVEMFVGVGASRVRDLFENAKKNAPCIIFIDEIDAVGRQRGAGLGGGHDEREQTLNQLLVEMDGFSANEGIIIIAATNRADILDPALLRPGRFDRQITVGRPDVKGREEVLKVHASNKPLADDVNLKTIATRTPGFSGADLENLLNEAALVAARQDEKKISMVHIEEAIDRVIAGPAKKSRVISEKEKNIVAWHEAGHTVVGVKLENADMVHKVTIVPRGVAGGYAVMLPKEDRYFMTKPELLDKIVGLLGGRVAEEIQFGEASTGAHNDFQRATSIARKMVTEYGMSEKLGPMQFGSGSGGQVFLGRDIQNEQNYSDAIAHEIDLEVQRIIKECYERCKQILLDNKKSLDLVAETLLDLETLDAEQIKSLIHDGKLPDNHHLAEKIAETRENGQDSEVKVNIHSKKGEEAEGEESAPNTEDVKEDDEKK

SEQ ID NO: 23145 - protein, 797 aa, Homo sapiens
MAHRCLRLWGRGGCWPRGLQQLLVPGGVGPGEQPCLRTLYRFVTTQARASRNSLLTDIIAAYQRFCSRPPKGFGKYFPNGKNGKKASEPKEVMGEKKESKPAATTRSSGGGGGGGGKRGGKKDDSHWWSRFQKGDIPWDDKDFRMFFLWTALFWGGVMFYLLLKRSGREITWKDFVNNYLSKGVVDRLEVVNKRFVRVTFTPGKTPVDGQYVWFNIGSVDTFERNLETLQQELGIEGENRVPVVYIAESDGSFLLSMLPTVLIIAFLLYTIRRGPAGIGRTGRGMGGLFSVGETTAKVLKDEIDVKFKDVAGCEEAKLEIMEFVNFLKNPKQYQDLGAKIPKGAILTGPPGTGKTLLAKATAGEANVPFITVSGSEFLEMFVGVGPARVRDLFALARKNAPCILFIDEIDAVGRKRGRGNFGGQSEQENTLNQLLVEMDGFNTTTNVVILAGTNRPDILDPALLRPGRFDRQIFIGPPDIKGRASIFKVHLRPLKLDSTLEKDKLARKLASLTPGFSGADVANVCNEAALIAARHLSDSINQKHFEQAIERVIGGLEKKTQVLQPEEKKTVAYHEAGHAVAGWYLEHADPLLKVSIIPRGKGLGYAQYLPKEQYLYTKEQLLDRMCMTLGGRASEEIFFGRITTGAQDDLRKVTQSAYAQIVQFGMNEKVGQISFDLPRQGDMVLEKPYSEATARLIDDEVRILINDAYKRTVALLTEKKADVEKVALLLLEKEVLDKNDMVELLGPRPFAEKSTYEEFVEGTGSLDEDTSLPEGLKDWNKEREKEKEEPPGEKVAN

SEQ ID NO: 23146 - protein, 812 aa, Homo sapiens
GAGGRRRRVESLGSSVSRRRASLPGGLSPSRARFPRPPVVACPRLREQPCLRTLYRFVTTQARASRNSLLTDIIAAYQRFCSRPPKGFEKYFPNGKNGKKASEPKEVMGEKKESKPAATTRSSGGGGGGGGKRGGKKDDSHWWSRFQKGDIPWDDKDFRMFFLWTALFWGGVMFYLLLKRSGREITWKDFVNNYLSKGVVDRLEVVNKRFVRVTFTPGKTPVDGQYVWFNIGSVDTFERNLETLQQELGIEGENRVPVVYIAESDGSFLLSMLPTVLIIAFLLYTIRRGPAGIGRTGRGMGGLFSVGETTAKVLKDEIDVKFKDVAGCEEAKLEIMEFVNFLKNPKQYQDLGAKIPKGAILTGPPGTGKTLLAKATAGEANVPFITVSGSEFLEMFVGVGPARVRDLFALARKNAPCILFIDEIDAVGRKRGRGNFGGQSEQENTLNQLLVEMDGFNTTTNVVILAGTNRPDILDPALLRPGRFDRQIFIGPPDIKGRASIFKVHLRPLKLDSTLEKDKLARKLASLTPGFSGADVANVCNEAALIAARHLSDSINQKHFEQAIERVIGGLEKKTQVLQPEEKKTVAYHEAGHAVAGWYLEHADPLLKVSIIPRGKGLGYAQYLPKEQYLYTKEQLLDRMCMTLGGRVSEEIFFGRITTGAQDDLRKVTQSAYAQIVQFGMNEKVGQISFDLPRQGDMVLEKPYSEATARLIDDEVRILINDAYKRTVALLTEKKADVEKVALLLLEKEVLDKNDMVELLGPRPFAEKSTYEEFVEGTGSLDEDTSLPEGLKDWNKEREKEKEEPPGEKVAN

SEQ ID NO: 23147 - protein, 806 aa, Mus musculus
MASGADSKGDDLSTAILKQKNRPNRLIVDEAINEDNSVVSLSQPKMDELQLFRGDTVLLKGKKRREAVCIVLSDDTCSDEKIRMNRVVRNNLRVRLGDVISIQPCPDVKYGKRIHVLPIDDTVEGITGNLFEVYLKPYFLEAYRPIRKGDIFLVRGGMRAVEFKVVETDPSPYCIVAPDTVIHCEGEPIKREDEEESLNEVGYDDVGGCRKQLAQIKEMVELPLRHPALFKAIGVKPPRGILLYGPPGTGKTLIARAVANETGAFFFLINGPEIMSKLAGESESNLRKAFEEAEKNAPAIIFIDELDAIAPKREKTHGEVERRIVSQLLTLMDGLKQRAHVIVMAATNRPNSIDPALRRFGRFDREVDIGIPDATGRLEILQIHTKNMKLADDVDLEQVANETHGHVGADLAALCSEAALQAIRKKMDLIDLEDETIDAEVMNSLAVTMDDFRWALSQSNPSALRETVVEVPQVTWEDIGGLEDVKRELQELVQYPVEHPDKFLKFGMTPSKGVLFYGPPGCGKTLLAKAIANECQANFISIKGPELLTMWFGESEANVREIFDKARQAAPCVLFFDELDSIAKARGGNIGDGGGAADRVINQILTEMDGMSTKKNVFIIGATNRPDIIDPAILRPGRLDQLIYIPLPDEKSRVAILKANLRKSPVAKDVDLEFLAKMTNGFSGADLTEICQRACKLAIRESIESEIRRERERQTNPSAMEVEEDDPVPEIRRDHFEEAMRFARRSVSDNDIRKYEMFAQTLQQSRGFGSFRFPSGNQGGAGPSQGSGGGTGGSVYTEDNDDDLYG

SEQ ID NO: 23148 - protein, 806 aa, Mus musculus
MASGADSKGDDLSTAILKQKNRPNRLIVDEAINEDNSVVSLSQPKMDELQLFRGDTVLLKGKKRREAVCIVLYDDTCSDEKIRMNRVVRNNLRVRLGDVISIQPCPDVKYGKRIHVLPIDDTVEGITGNLFEVYLKPYFLEAYRPIRKGDIFLVRGGMRAVEFKVVETDPSPYCIVAPDTVIHCEGEPIKREDEEESLNEVGYDDIGGCRKQLAQIKEMVELPLRHPALFKAIGVKPPRGILLYGPPGTGKTLIARAVANETGAFFFLINGPEIMSKLAGESESNLRKAFEEAEKNAPAIIFIDELDAIAPKREKTHGEVERRIVSQLLTLMDGLKQRAHVIVMAATNRPNSIDPALRQFGRFDREVDIGIPDATGRLEILQIHTKNMKLADDVDLEQVANETHGHVGADLAALCSEAALQAIRKKMDLIDLEDETIDAEVMNSLAVTMDDFRWALSQSNPSALRETVVEVPQVTWEDIGGLEDVKRELQELVQYPVEHPDKFLKFGMTPSKGVLFYGPPGCGKTLLAKAIANECQANFISIKGPELLTMWFGESEANVREIFDKARQAAPCVLFFDELDSIAKARGGNIGDGGGAADRVINQILTEMDGMSTKKNVFIIGATNRPDIIDPAILRPGRLDQLIYIPLPDEKSRVAILKANLRKSPVAKDVDLEFLAKMTNGFSGADLTEICQRACKLAIRESIESEIRRERERQTNPSAMEVEEDDPVPEIRRDHFEEAMRFARRSVSDNDIRKYEMFAQTLQQSRGFGSFRFPSGNQGGAGPSQGSGGGTGGSVYTEDNDDDLYG

SEQ ID NO: 23149 - protein, 806 aa, Mus musculus
MASGADSKGDDLSTAILKQKNRPNRLIVDEAINEDNSVVSLSQPKMDELQLFRGDTVLLKGKKRREAVCIVLSDDTCSDEKIRMNRVVRNNLRVRLGDVISIQPCPDVKYGKRIHVLPIDDTVEGITGNLFEVYLKPYFLEAYRPIRKGDIFLVRGGMRAVEFKVVETDPSPYCIVAPDTVIHCEGEPIKREDEEESLNEVGYDDIGGCRKQLAQIKEMVELPLRHPALFKAIGVKPPRGILLYGPPGTGKTLIARAVANETGAFFFLINGPEIMSKLAGESESNLRKAFEEAEKNAPAIIFIDELDAIAPKREKTHGEVERRIVSQLLTLMDGLKQRAHVIVMAATNRPNSIDPALRRFGRFDREVDIGIPDATGRLEILQIHTKNMKLADDVDLEQVANETHGHVGADLAALCSEAALQAIRKKMDLIDLEDETIDAEVMNSLAVTMDDFRWALSQSNPSALRETVVEVPQVTWEDIGGLEDVKRELQELVQYPVEHPDKFLKFGMTPSKGVLFYGPPGCGKTLLAKAIANECQANFISIKGPELLTMWFGESEANVREIFDKARQAAPCVLFFDELDSIAKARGGNIGDGGGAADRVINQILTEMDGMSTKKNVFIIGATNRPDIIDPAILRPGRLDQLIYIPLPDEKSRVAILKANLRKSPVAKDVDLEFLAKMTNGFSVADLTEICQRACKLAIRESIESEIRRERERQTNPSAMEVEEDDPVPEIRRDHFEEAMRFARRSVSDNDIRKYEMFAQTLQQSRGFGSFRFPSGNQGGAGPSQGSGGGTGGSVYTEDNDDDLYG

SEQ ID NO: 23150 - protein, 801 aa, Mus musculus
MASGADSKGDDLSTAILKQKNRPNRLIVDEAINEDNSVVSLSQPKMDELQLFRGDTVLLKGKKRREAVCIVLSDDTCSDEKIRMNRVVRNNLRVRLGDVISIQPCPDVKYGKRIHVLPIDDTVEGITGNLFEVYLKPYFLEAYRPIRKGDIFLVRGGMRAVEFKVVETDPSPYCIVAPDTVIHCEGEPIKREDEEESLNEVGYDDIGGCRKQLAQIKEMVELPLRHPALFKAIGVKPPRGILLYGPPGTGKTLIARAVANETGAFFFLINGPEIMSKLAGESESNLRKAFEEAEKNAPAIIFIDELDAIAPKREKTHGEVERRIVSQLLTLMDGLKQRAHVIVMAATNRPNSIDPALRRFGRFDREVDIGIPDATGRLEILQIHTKNMKLADDVDLEQVANETHGHVGADLAALCSEAALQAIRKKMDLIDLEDETIDAEVMNSLAVTMDDFRWALSQSNPSALRETVVEVPQVTWEDIGGLEDVKRELQELVQYPVEHPDKFLKFGMTPSKGVLFYGPPGCGKTLLAKAIANECQANFISIKGPELLTMWFGESEANVREIFDKARVLFFDELDSIAKARGGNIGDGGGAADRVINQILTEMDGMSTKKNVFIIGATNRPDIIDPAILRPGRLDQLIYIPLPDEKSRVAILKANLRKSPVAKDVDLEFLAKMTNGFSGADLTEICQRACKLAIRESIESEIRRERERQTNPSAMEVEEDDPVPEIRRDHFEEAMRFARRSVSDNDIRKYEMFAQTLQQSRGFGSFRFPSGNQGGAGPSQGSGGGTGGSVYTEDNDDDLYG

SEQ ID NO: 23151 - protein, 723 aa, Mus musculus
MNRVVRNNLRVRLGDVISIQPCPDVKYGKRIHVLPIDDTVEGITGNLFEVYLKPYFLEAYRPIRKGDIFLVRGGMRAVEFKVVETDPSPYCIVAPDTVIHCEGEPIKREDEEESLNEVGYDDIGGCRKQLAQIKEMVELPLRHPALFKAIGVKPPRGILLYGPPGTGKTLIARAVANETGAFFFLINGPEIMSKLAGESESNLRKAFEEAEKNAPAIIFIDELDAIAPKREKTHGEVERRIVSQLLTLMDGLKQRAHVIVMAATNRPNSIDPALRRFGRFDREVDIGIPDATGRLEILQIHTKNMKLADDVDLEQVANETHGHVGADLAALCSEAALQAIRKKMDLIDLEDETIDAEVMNSLAVTMDDFRWALSQSNPSALRETVVEVPQVTWEDIGGLEDVKRELQELVQYPVEHPDKFLKFGMTPSKGVLFYGPPGCGKTLLAKAIANECQANFISIKGPELLTMWFGESEANVREIFDKARQAAPCVLFFDELDSIAKARGGNIGDGGGAADRVINQILTEMDGMSTKKNVFIIGATNRPDIIDPAILRPGRLDQLIYIPLPDEKSRVAILKANLRKSPVAKDVDLEFLAKMTNGFSGADLTEICQRACKLAIRESIESEIRRERERQTNPSAMEVEEDDPVPEIRRDHFEEAMRFARRSVSDNDIRKYEMFAQTLQQSRGFGSFRFPSGNQGGAGPSQGSGGGTGGSVYTEDNDDDLYG

SEQ ID NO: 23152 - protein, 458 aa, Mus musculus
MASGADSKGDDLSTAILKQKNRPNRLIVDEAINEDNSVVSLSQPKMDELQLFRGDTVLLKGKKRREAVCIVLSDDTCSDEKIRMNRVVRNNLRVRLGDVISIQPCPDVKYGKRIHVLPIDDTVEGITGNLFEVYLKPYFLEAYRPIRKGDIFLVRGGMRAVEFKVVETDPSPYCIVAPDTVIHCEGEPIKREDEEESLNEVGYDDVGGCRKQLAQIKEMVELPLRHPALFKAIGVKPPRGILLYGPPGTGKTLIARAVANETGAFFFLINGPEIMSKLAGESESNLRKAFEEAEKNAPAIIFIDELDAIAPKREKTHGEVERRIVSQLLTLMDGLKQRAHVIVMAATNRPNSIDPALRRFGRFDREVDIGIPDATGRLEILQIHTKNMKLADDVDLEQVANETHGHVGADLAALCSEAALQAIRKKMDLIDLEDETIDAEVMNSLAVTMDDFRWALSQ

SEQ ID NO: 23153 - protein, 892 aa, Mus musculus
MSSKKNRKRQKEGAEGASPSLSAAPSRSGTSTPFAQPSPAAPGMLVVTNFLEKDGKVPKTFQNSLVHLGLNTMKSANICIGRPVLLTSLDGKQEVYTAWPVAGFPGGKVGLSEMAQKNVGVRAGETIQVQPLLGAVLQAQEMDLALSDKDKEINEEELTGCILRKLDGKIVLPGNFLYCTFYGRLCKLQVLQVKGTDGTTLGKPQSASGTDAQGMASEHSSMENSDVDLSFQLSQLDLKEPQSPSSQSTPCKPTNDRTVNKAGEVLLDVTQSPRDGSGLGLEESTGLKCSFDSSKEGNTQPVSEEKLLKPASAGTKSNTDTFYFISSTTRINLRKICTNSKEQDSQFKVTYDMIGGLNSQLKAIREIIELPLKQPELFKSYGIPAPRGLLLYGPPGTGKTMIARAVANEVGAYVSVINGPEIISKFYGETEARLRQIFAEATLRHPSIIFIDELDALCPKREGAQSEVEKRVVASLLTLMDGIGSEGSEGRVLVLGATNRPQALDAALRRPGRFDKEIEIGIPNAQDRLDILQKLLRRVPHLLTKAELLRLANNAHGYVGADLKALCNEAGLHALRRVLRKQPNLPDSKVAGMVKITLNDFLQGMNDIRPSAMREVAIDVPNVSWSDIGGLENIKLKLKQAVEWPLKHPKSFNRMGIQPPKGVLLYGPPGCSKTMIAKALANESGLNFLAIKGPELMNKYVGESERAVREIFRKARAVAPSIIFFDELDALAVERGSSSGAGNVADRVLAQLLTEMDGIEQLKNVTVLAATNRPDRIDKALMRPGRIDRIIYVPLPDAATRREILNLQFHSMPISNEVDLDELVLQTDTYSGAEIIAVCKEAALLALEENIKADCIMKRHFTEALSIVTPRIPESLRRFYEDYQEKSGLHTV

SEQ ID NO: 23154 - protein, 893 aa, Mus musculus
MSSKKNRKRQKEGAEGASPSLSAAPSRSGTSTPFAQPSPAAPGMLVVTNFLEKVDGKVPKTFQNSLVHLGLNTMKSANICIGRPVLLTSLDGKQEVYTAWPVAGFPGGKVGLSEMAQKNVGVRAGETIQVQPLLGAVLQAQEMDLALSDKDKEINEEELTGCILRKLDGKIVLPGNFLYCTFYGRLCKLQVLQVKGTDGTTLGKLQSASGTDAQGMASEHSSMESSDVDLSFQLSQLDLKEPQSPSSQSTPCKPTNDRTVNKAGEVLLDVTQSPRDGSGLGLEESTGLKCSFDSSKEGNTQPVSEEKLLKPASAGTKSNTDTFYFISSTTRINLRKICTNSKEQDSQFKVTYDMIGGLNSQLKAIREIIELPLKQPELFKSYGIPAPRGLLLYGPPGTGKTMIARAVANEVGAYVSVINGPEIISKFYGETEARLRQIFAEATLRHPSIIFIDELDALCPKREGAQSEVEKRVVASLLTLMDGIGSEGSEGRVLVLGATNRPQALDAALRRPGRFDKEIEIGIPNAQDRLDILQKLLRRVPHLLTKAELLRLANNAHGYVGADLKALCNEAGLHALRRVLRKQPNLPDSKVAGMVKITLNDFLQGMNDIRPSAMREVAIDVPNVSWSDIGGLENIKLKLKQAVEWPLKHPKSFNRMGIQPPKGVLLYGPPGCSKTMIAKALANESGLNFLAIKGPELMNKYVGESERAVREIFRKARAVAPSIIFFDELDALAVERGSSSGAGNVADRVLAQLLTEMDGIEQLKNVTVLAATNRPDRIDKALMRPGRIDRIIYVPLPDAATRREILNLQFHSMPISNEVDLDELVLQTDTYSGAEIIAVCKEAALLALEENIKADCIMKRHFTQALSIVTPRIPESLRRFYEDYQEKSGLHTV

SEQ ID NO: 23155 - protein, 806 aa, Rattus norvegicus
MASGADSKGDDLSTAILKQKNRPNRLIVDEAINEDNSVVSLSQPKMDELQLFRGDTVLLKGKKRREAVCIVLSDDTCSDEKIRMNRVVRNNLRVRLGDVISIQPCPDVKYGKRIHVLPIDDTVEGITGNLFEVYLKPYFLEAYRPIRKGDIFLVRGGMRAVEFKVVETDPSPYCIVAPDTVIHCEGEPIKREDEEESLNEVGYDDIGGCRKQLAQIKEMVELPLRHPALFKAIGVKPPRGILLYGPPGTGKTLIARAVANETGAFFFLINGPEIMSKLAGESESNLRKAFEEAEKNAPAIIFIDELDAIAPKREKTHGEVERRIVSQLLTLMDGLKQRAHVIVMAATNRPNSIDPALRRFGRFDREVDIGIPDATGRLEILQIHTKNMKLADDVDLEQVANETHGHVGADLAALCSEAALQAIRKKMDLIDLEDETIDAEVMNSLAVTMDDFRWALSQSNPSALRETVVEVPQVTWEDIGGLEDVKRELQELVQYPVEHPDKFLKFGMTPSKGVLFYGPPGCGKTLLAKAIANECQANFISIKGPELLTMWFGESEANVREIFDKARQAAPCVLFFDELDSIAKARGGNIGDGGGAADRVINQILTEMDGMSTKKNVFIIGATNRPDIIDPAILRPGRLDQLIYIPLPDEKSRVAILKANLRKSPVAKDVDLEFLAKMTNGFSGADLTEICQRACKLAIRESIESEIRRERERQTNPSAMEVEEDDPVPEIRRDHFEEAMRFARRSVSDNDIRKYEMFAQTLQQSRGFGSFRFPSGNQGGAGPSQGSGGGTGGNVYTEDNDDDLYG

SEQ ID NO: 23156 - protein, 978 aa, Rattus norvegicus
MALAVLHVLEPFPTETPPLAVLLPPGGPWPVTGVGLVLALRPASESPAGPALLVAAVEGSGAQCEQRGPGPPPLLVSRTLLRVLALSPGARVRARPVRRPPALGWALLGTSPGPGLGPRVGPLLVRRGETLPVPGSRVLETRPALQGLLGPGTRLAVTELQGRTKLDPESRDHNHPPPPPVVSSFAVSHSIRQLRGVLGGTGDALGVSRSCLRSLGLFQGEWVWVARVGELPNTSQPHLAQVQVLEPRWDLSARLGPNSGQPGEPLADGLVFVPATLAFNLGCDPLEVGELRIQRYLEDSTAAEDKGSCSLLPGPPFARELHIEVLPSPHCGVNGKYDHVLYQHFHTPRVVQEGDVLCVSTAGQVEILEGSLERLPRWREVFFKVKKTVGEAPDGPASAFLADTTHTSLYLAGTTLSRVPPLPSGRSPPWDSLSPPGLEALVNELCAVLKPHLQPGGTLLTGTSCVLLQGPPGSGKTTAVTAACSRLGLHLLKVPCSSLCADSSRTVETKLQTTFSRARRCRPVVLLLTALDLLGRDRDGLGEDARVVATLRHLLLDEDPLSRCPPLMVVATTSRVQDLPTDVRTAFPHELEVPVLSESQRLSVLQALTAHLPLGQEVNLSQLARRCAGFVVGDLYALLTHASRAACTRIKAAGLAMSEEDEGELCAAGFPLLAEDFGQALDQLQTAHSQAVGAPKIPSVSWHDVGGLQDVKKEILETIQLPLEHPELLSLGLRRSGLLLHGPPGTGKTLLAKAVATECSLTFLSVKGPELINMYVGQSEENVREVFARARAAAPCIIFFDELDSLAPSRGRSGDSGGVMDRVVSQLLAELDGLHSTQDVFVIGATNRPDLLDPALLRPGRFDKLVFVGASEDRASQLRVLSAITRKFKLEASVSLMNVLDCCPPQLTGADLYSLCSDAMMTALKRRVRDLEEGLEPRSSALLLTMEDLLQAAARLQPSVSEQELLRYKRIQRKFAAC

SEQ ID NO: 23157 - protein, 978 aa, Rattus norvegicus
MALAVLHVLEPFPTETPPLAVLLPPGGPWPVTGVGLVLALRPASESPAGPALLVAAVEGSGAQCEQRGPGPPPLLVSRTLLRVLALSPGARVRARPVRRPPALGWALLGTSPGPGLGPRVGPLLVRRGETLPVPGSRVLETRPALQGLLGPGTRLAVTELQGRTKLDPESRDHNHPPPPPVVSSFAVSHSIRQLRGVLGGTGDALGVSRSCLRSLGLFQGEWVWVARVGELPNTSQPHLAQVQVLEPRWDLSARLGPNSGQPGEPLADGLVFVPATLAFNLGCDPLEVGELRIQRYLEGSTAAEDKGSCSLLPGPPFARELHIEVLPSPHCGANGKYDHVLYRHFHTPRVVQEGDVLCVSTAGQVEILEGSLERLPRWREVFFKVKKTVGEAPDGPASAFLADTTHTSLYLAGTTLSRVPPLPSGRSPPWDSLSPPGLEALVNELCAVLKPHLQPGGTLLTGTSCVLLQGPPGSGKTTAVTAACSRLGLHLLKVPCSSLCADSSRTVETKLQTTFSRARRCRPVVLLLTALDLLGRDRDGLGEDACVVATLRHLLLDEDPLSRCPPLMVVATTSRVQDLPTDVRTAFPHELEVPVLSESQRLSVLQALTAHLPLGQEVNLSQLARRCAGFVVGDLYALLTHASRAACTRIKAAGLAMSEEDEGELCAAGFPLLAEDFGQALDQLQTAHSQAVGAPKIPSVSWHDVGGLQDVKKEILETIQLPLEHPELLSLGLRRSGLLLHGPPGTGKTLLAKAVATECSLTFLSVKGPELINMYVGQSEENVREVFARARAAAPCIIFFDELDSLAPSRGRSGDSGGVMDRVVSQLLAELDGLHSTQDVFVIGATNRPDLLDPALLRPGRFDKLVFVGASEDRASQLRVLSAITRKFKLEASVSLMNVLDCCPPQLTGADLYSLCSDAMMTALKRRVRDLEEGLEPRSSALLLTMEDLLQAAARLQPSVSEQELLRYKRIQRKFAAC

SEQ ID NO: 23158 - protein, 613 aa, Nostoc sp. PCC 7120
MSDLFKGFEQLIELVKTLEEKAEKGEIKTDFQINSRSMSSIPRTGNIPRPNNMANDIGTSRIRTQPSPNSDSGNGDSSDVVVPPDAPSGNSLKDVGGLGEVVKELKELIAIPLKRPDLLAKLGLEPTRGVLLVGPPGTGKTLTARGLAEELGVNYIALVGPEVISKYYGEAEQRLRGIFEKAAKNAPCIIFIDEIDSLAPDRSAVEGEVEKRLVAQLLSLMDGFSHSQGVIVLAATNRPDHLDPALRRPGRFDREVQFRVPDVKGRRDILQILTRAMPLEETVDLDAIAERSVGFVGADLKALCQKAAYTALRRQMPSVESAVPENMTVSQADFLQALKEIKPAVLRSVEVEVPHIAWDDIGGLDTIKQTLRESVEGALLYPELYLQTKALAPKGILLWGPPGTGKTLLAKAVASQARANFIGVNGPELLSRWVGASEQAVRELFAKARQAEPCVVFIDEIDTLAPARGSFSGDSGVSDRVVGQLLTELDGIEVGSTILVIGATNRPDALDPALLRAGRLDLQMKVDLPDLASRLAILLVHSQGRPLDGVDFNYWAEMTQDWNGADLTLLCNQAAVEAIRRFRSQGLTDPSEIKITTDDFNYAYKVLTEQRPD

SEQ ID NO: 23159 - protein, 663 aa, Rhodopseudomonas palustris
MSPRRSRGCSSVPKVAVARLVRLARLADGGAKFGAAVGDGWWAGLCRSLPRLGRSAPDDDGNPPRRSFDNHRVARGDRVEIGSKGQRRCYMVVDVIPDGSGVIDRATEVTIDHRAMADATTSPYDDVGGLAREVALVREMVELPLRFPHVFARLGIEAPKGVLLYGPPGCGKTLIARTVAREAGVYFLHVNGPEIIQKHYGESEEMLRRIFADAQKQPAAIIFFDEIDAIAPNRETVLGDVEKRVVAQLLALMDGLTARGNIVVIAATNLPNSLDPALRRPGRFDREIGIAPPDRAGRLEILRIHTRRMPLADDVDLAQIAAAAHGYLGADLAALCREAAMGCTRDLGPRLVAGDPGAAAALDGDLQVRMDHFRRALREVPLASTRSLTTEVAASHWDEVGGLDDIKALLRETVEWPLKYPQRLAFAKTTAPRGILLTGPTGTGKTLIVRALATQSDVNFIAVNGPELLSKWVGETERAIRDVFRKARQSAPSIIFFDEVDAIVASRGGDDGGARIGDRMVGQFLLEMDGLAGLDGVVVIAATNRPDLIDRALLRPGRFDHIATLALPDRAARAAILAIHCRGRALGSDVDLAALAKACAGMSGADLEALCRRAAMAAIRASIIAEPGADFAPFAITGGDFDAALADWRTATPEGASKLDAVA

SEQ ID NO: 23160 - protein, 689 aa, Sulfolobus tokodaii
MDGITRKNAGVSIGDKVIVRKASPKIATSVKLAPSNFSITVDPGFISYVKKKLKDYPLVEGDTVLIPVLGQAIPFTVVQVRPQGIVIVSDETSITISEKPAEQARYPRVTYEDIGGMKHIIQKIRELVELPLKHPELFKRLGIEPPKGILLYGPPGVGKTLLAKAVANETEAYFTSINGPEIMSKFYGESEQRLREIFEDAKKHAPAIIFIDEIDAIAPKRDEVIGEVERRVVAQLLTLMDGLESRGNVIVIAATNRPNAVDPALRRPGRFDREIEIPLPDKQGRLEILQIHTRNMPLSKDVDLEKLAEMTHGYTGADLSALVREAAMNALRRYLQVIDLNQDKIPPEILEKMEVNMDDFLKAFKEIVPSGLREIYVEVPEVHWSDIGGLEDVKEELREVVEYPLKYREAYENVGIEPPKGILLFGPPGTGKTMLAKAVATESGANFIAVRGPEILSKWVGESEKAIREIFRKARQAAPTVIFFDEIDAIAPMRGLTTDSGVTERIVNQLLAEMDGIEKLENVVIIAATNRPDILDPALLRPGRFDRLIYVPPPDKRARAEILKVHTRNVPLAEDITLDELAEKTEGYTGADLAALVREATLRAIREEMTECMKKADENCKRNDNECRDKIVKDCMKGKGVLVEKRHFDIALKKVRPSVTMDMIQFYQNWLEKARQQLPRANLKPSTFT

SEQ ID NO: 23161 - protein, 747 aa, Sulfolobus tokodaii
MSQEVSLRVSEARQRDVGKKIARLSDYTMRKLGIETGDYIEIIGPNGSALAQAMPSYDISDDEIKIDGYIRKSIGVGIGDDVKVKKANVTPATKITLAPTQPIRFDRSFVEYVKDQLMNKPLAKGETIPVPIYTGTLDFIVINTQPSNYVYVTESTNLEIREEPAKESELGGYPKVTWEDIGDLEEAKQKIREIVEWPLRHPELFQRLGIEPPKGILLYGPPGNGKTLLARALANEVGASFYTINGPEIMSKFYGESEQRLREIFEEAQKNAPAIIFIDEIDSIAPKREEVTGEVEKRVVAQLLTLMDGIKGRGKVIVIGATNRPDAVDPALRRPGRFDREIEIRPPDTKGRKEILQVHTRNMPLAEDVDLDKLAEITYGYTGADLAALAKEAAMNALRRFIAEKKINLEQERIPAEILKELKVTMQDFLEAMKSIQPTLLREVYVEVPKVHWNDIGGLEEVKQQLREAVEWPLRFSELFNKSGITPPKGILLFGPPGTGKTMLAKAVATESGANFIAVRGPEILSKWVGESEKAIREIFRKARQAAPTIIFFDEIDAIAPMRGLTTDSGVTERIVNQLLAEMDGIVPLNKVVVIAATNRPDILDPALLRPGRFDRLIYVPPPDKRARAEILKVHTRNVPLAEDITLDELAEKTEGYTGADIEALVREATINAMRKIFNDCDKKAKDQCQNNVDCYNSKMRDCMNNAKVIVTKEDFNKALEVVKPSLTAADIQRYERLAKELKRSVL

SEQ ID NO: 23162 - protein, 700 aa, Sulfolobus tokodaii
MISQQFFFVRVYEGRVKQDVALVSSNIMQSYGLLPGDVILLLGNRQIPFYVQESSDNKIDGIVIGENKLKLLGIRSGERVPVRKVSVSSIKEITLAPSEQKNYDLRKLNLELRGRLVTRGITLESKEGTFAVISYSPQVEVGYISSETRINIAPESIRIAQKNIPYVTLDDVGGLSKQIRELLEIVELALTKVEVARMLGLRPPKGVLLYGPPGTGKTLIAKAIANTIMANFFYISGPEIGSKYYGESEKRLRDIFEQAEKNAPSIIFVDEIDAIAPNRDTTSSETDRRIVAQLLTLMDGLTSGSGVVVIGATNRPNALDPALRRPGRFDREIEIPVPDKQGRLEILKIHTRRVPLSQEVDLEKIAERTHGFVGADLEALVREAVLSAYHRCNGNLECMQVTMSDFDEALKNVEPSALREFRIEIPNTTWEDIVGLEDIKLELKEVVEWPLKDPGLYEEMKAEIPSGILLYGPPGTGKTMLARAVAHESGANFIAINGPELMSMWVGETERAIREVFKKARQSSPTIIFFDEIDAIAVARGADPNKVTDRIVSQLLTEMDGISKRREKVVIIAATNRPDIIDPALLRPGRLEKLIYVPPPDYQTRIALFSRLINNRPHEEIDIERLAKLTENYTPAEIKGIVNKAVLLAIRRAKLKNEKPELTMSDFEEALKTVKPIVTQTMLDYYVSFYQRVRRASGYA

SEQ ID NO: 23163 - protein, 605 aa, Sulfolobus tokodaii
MGVTQFIPLIEVLGAVGITIVLLVLLFRKQTQKFILSDKALQIQQKSQKKKEEVKEKITWDMIGGYDDVKKEIKEYIEIPLKYKEIAKKYGLRPPKGILLFGPPGCGKSLMMRALANEAKINFIYVNVSDIMSKWYGESEARLRELFANARKNAPCILFFDEIDTIGVKRESHTGDSVTPRLLSLMLSEIDGLQSEDGVIIVGSTNVPHLLDKALLRAGRFDKLIYIGVPDKKSRKEIFLIHCKNMPLGEDVDFDKLAEMTERFTGADIANVCQEVARMAAVEALEKGVERKITLQDFINVIKRYKPSVTLQMLDEYEKFRLDYERKFRGPELPESEDAEKITLNDIGGYEEIKKELYDLLEMQFKYYNLMEQMKIPSIRGILLYGPPGVGKTMMAKALARTLGVRLIMLSGAEILYKGYEGAVSAVKEVFNRARENKPSILLLDELDAIAPKRENQKSEASKIVNQLLTEMDGIRSLKEVVVIGTTNRLEDIDPALKRPGRFDRIIYMPLPNKDERKDIFEKYLGKDICEQVNCDKLADITEGYSGADIAAVTREAKLKVLKEIIRGNKERKLTYEDLLEAIAKVKPSVKKEQLNSTSSDLKKE

SEQ ID NO: 23164 - protein, 587 aa, Sulfolobus tokodaii
MNANTSTSPTSSLLSTYINAIELGIIILTFVIPLIYFIYFMRMMRVGHSQQRQLERKMNRIPSITWDQIYDMEEIKARLDEIASYVMKKGKAYGVILFGPPGTGKTSIAKALANKLRWNYFELKSTDVMSKWYGESEYLLDNFFNVVELNAPAVVVIDEIDGFTLKREGDIHEVTHRLINIFLMRLQELHDKSLPVLIIGTTNIPQEIDEALLRPGRFDEVIYVPLPDENGREKIWCGYVQNVDCKELAKRSNRLSPADIKEIVEEVKIQCEKEGRTPTTQDFIKALENYKPSVSIQIIVKFENIAKKYSRHKLGERPYGVPDVRWDDLGDLEDVKRIIKDSIELPLKRKDLAEKLGIKPVKGLLLYGPPGTGKTSIAKALANELNASFIILSGEEISSAGPFNAGEIIAEKFHIARDNAPAIIFIDEIDMIARARGENEWRTALTELLNQMDGIRENEEIVVVGATNRPWDLDPAILRPGRFDKIIYVPPPDEKGRAEVLKVLCRGLTVDEETLQKVAKITDGYTPADLKLVVDEIRRNLLKEATITGVARTTLTFNDFIKILANVKPSVNKETLKMYEEFKIQRI

SEQ ID NO: 23165 - protein, 738 aa, Pyrobaculum aerophilum str. IM2
MSTEVILKVAEARSRDVGRSIVRLPVRIMKKLGIEPGDYVEIIGRKSAYAQVWPAYPEDEDKEVIRMDGIIRQNAGVGIGDTVKVRKAVLKPAQRVVLTPTEPVRVDSEYLKKQILLGKPVARGQAIDVPFYGGAIRFVVVQVQPGPAAYVSIDTEVTVREEPVKEAELTIPRVTWEDIGDLEDAKQKIRELVELPLRHPELFKHLGIEPPKGILLIGPPGTGKTLLAKAVANEANAYFVAINGPEIMSKYYGESEARLREIFEEAKKNAPAIIFIDEIDAIAPKREEVTGEVEKRVVAQLLTLMDGLQERGQVIVIGATNRPDAVDPALRRPGRFDREIHIPMPDKRARREILAVHTRNMPLCTKADVETKICNPGDEVDLDRIAEMTHGYTGADLAALAKEAAMTALRKAMNKGMINIEQDIIPQEVLSKLKVGMSDFLEAMKFVHPTVLREVIIEVPEVHWDDIGGYDTIKQELREIVEWPMKYKHYFDELGVEPPKGILLFGPPGVGKTLFAKAVATESGANFIAVRGPELLSKWVGESEKAIREVFKKARMAAPCVIFFDEIDSIAPARGSRLGDSGVTDRMVNQLLAEMDGIGTLKNVVVMAATNRPDILDPALLRPGRFDRVIYVPPPDLKARIEIFKVHTKRVKLADDVNLEELAKRTEGYTGADIAALVREAAMLALRETIREKTVKAKPVSMKHFEEALKRIPPSLTPEDIRRYEEIAKRLRRAIAGL

SEQ ID NO: 23166 - protein, 731 aa, Pyrobaculum aerophilum str. IM2
MSDWIELRVQESKARDANRPVVRIDPEVMERAGIVVGDVVEIVGRRRTAAKVWNGLPEDRGKGVIRMNSILRKNADVSLNETVKVRRVEPKPAAFVKLAPVSMTIAVDANFLQYIKQRLREYVLVEGDMLQIHVLSQPLTFQVVQTKPSNTVLIITEDTQIQIFEKPVSGVKIPHVTWEDIGDLEDAKQKIRELVELPLRHPELFKHLGIEPPKGILLIGPPGTGKTLLAKAVANEANAYFVAINGPEIMSKYYGESEARLREIFEEAKKNAPAIIFIDEIDAIAPKREEVTGEVEKRVVAQLLTLMDGLQERGQVIVIGATNRPDAVDPALRRPGRFDREIWINPPDFKGRYEILLIHTRNMPLAPDVDLRKLAEMTHGFSGADLAALAREAAMSALRRAIQSGLIDLNQPSIPPEVFEKIKVTMTDFTSALREIVPSALREIHIEVPRVRWEDVGGLENVKQELREAVEWPLKYPDKFKKFGLRPPKGILLFGPPGTGKTLLAKAVATESGANFIAVRGPEIFSKWVGESEKMVREIFRKARMAAPAVVFIDEIDALATARGLGGDSLVTERVVAQLLAEMDGIKALENVVVIAATNRPDLVDPALLRPGRFDRIIYVPPPDFKARLDILLIHTRSTPLAKDVDLEELARRTEGYSGADLELLVREATFLALREDINAKEVSMRHFEEAMKKVRPSITPDMLKFYESWLEKARQLTVSAKAKATPPLYL

SEQ ID NO: 23167 - protein, 819 aa, Anopheles gambiae str. PEST
HPPSVRKQSEETVLQMADSKNDDLATAILKRKDRPNRLIVDEAANDDNSVISLSQAKMDELELFRGDTVLLKGKRRKETVCIVLSDENCPDEKIRMNRVVRNNLRVWLGDVVMIQSCPDVKYGKRVHILPIDDTVEGLSGNLFDVYLKPYFLEAYRPIHKDDTFIVRGGMRAVEFKVVAADPEPYCIVAPETVIHCEGNPIKREEEEETLNAVGYDDIGGCRKQLAQIKEMVELPLRHPSLFKAIGVKPPRGILMYGPPGTGKTLIARAVANETGAFFFLINGPEIMSKLAGESESNLRKAFEEAEKNSPAIIFIDEIDAIAPKREKTHGEVERRIVSQLLTLMDGMKKSSHVIVMAATNRPNSIDPALRRFGRFDREIDIGIPDATGRLEVLRIHTKNMKLADDVDLEQIAAESHGHVGADLASLCSEAALQQIREKMDLIDLEDDQIDAEVLNSLAVSMENFRYAMTKSSPSALRETVVEVPNTTWTDIGGLENVKRELQELVQYPVEHPDKFLKFGMQPSRGVLFYGPPGCGKTLLAKAIANECQANFISVKGPELLTMWFGESEANVRDIFDKARSASPCVLFFDELDSIAKSRGGNVGDAGGAADRVINQILTEMDGMGAKKNVFIIGATNRPDIIDPAILRPGRLDQLIYIPLPDEKSREAILRANLRKSPVAEDVDLNYVAKVTQGFSGADLTEICQRACKLAIRQAIEAEIRRERDRAASQNAAMDMDEEDPVPEITRDHFEEAMKFARRSVSDNDIRKYEMFAQTLQQSRGFGTNFRFPSGQGASSSQGQGSSQPTSNNPGDNGDDDLYS

SEQ ID NO: 23168 - protein, 787 aa, Anopheles gambiae str. PEST
MPPKSASKKEKPFWWNCEKCQTYLPTGELAKHQAEDCGNVNSLGGYVDAGGVYRCRKIEVGGLGIFEEVKLCTDSQRYGLVLVPISVVRRLGLMLGDFVAIKLTKAKDGKEVGTVVRTLWPVEDRHGAKVFFEALDEFNDVSANELNATVTTLDGRLEDAEEIFLRLEDPTQANLFAKNGKFLLTSLKYQLQGCAIMSNNPLSLTVCNKRFRFLVDHALTTEGNDLTDQLNKMSLKDRLYVILRTTKVTLLDDSKAAQHSHQQRMFSLANIGGLDTTISELKELLEMAFGMDSKQTTVGPVSRGILLSGVSGVGKTMLVNALATHYHCHVVRLNCSEVFSKFYGESEANVSRQFAEVFDVHPKPAMVVVEELHNLCPKSTATDIVKRISQHFLTLLDSLHANVRGNRAVVIGTTDSVDNVNPLLRRGGRMDYEFELPVPDAIARTAILERVLSRHGQTVPEQDIRAVARITHGYVGADLENLVSKAASSAPTGKPIDGPALMAALQHVKPSAMREIMIECPNVRWTDIGGQDELKLKLRQIIDWPIHHPELFDRLGIKPPRGLLMFGPPGCSKTMIAKAIATESRLNFLSIKGSELFSMWVGESERAVRDLFRRARQVAPSIIFFDEIDAIGGERSAESGSSVKERVLAQLLTEMDGVSVLKDVRIVAATNRPDLIDRALMRPGRLDRIVYVRLPDAAAREEIFRIKLKTIPTASTVDLAELVRRTAGCSGSEIEAICQEAALKGLESSFDVETIEWEHFEHALGVVRPRTSPELLRLYEEYLKQHQ

SEQ ID NO: 23169 - protein, 572 aa, Anopheles gambiae str. PEST
MGICGVYVKETQGPSVYGEVDRHTVIKIDQILYHPATLTQKPLGGIDGVREQLEAALTESRSLLLIGPSGSGKYSLVKSVISERNLPLFEIRGLHFLRSLPGETEAELRQTFLRLRLFQELIEREKPAILLVKDIDTICPKIGAKKGEDVVNIARIASQFVSLVDQYRESAENVIIIGTTSSVESMDTRLRRPGRLDKEITLGIPSKEQRIDILRCFYATARGTLTDEQLDLVGQRTAGYVGAELELLYYNLVREMHKQQLPFEEALAEIQKKHRPSNLRNATGLVGREATLSLDSFGGMDELKALLRLCIVEQLANPARFQRLGIHPLRGILLYGPPGCAKTTLAKCLAAETGMTFLSLSAAQVYSPYVGDAEKLITRVFNEARTNAPAVVFLDEIDSLVGNRGTGGMKGGSSAVNMGVLSTLLMEMDGIGQAEQAASALSEDAKRVVVIAATNRPDMVDDALLRPGRLTKLIHVPAPDGKGRLEILRKIATNVPFAEDVQLELVAEQTERYSGADLQNLCTQAALNAATEDLNATVVTMAHLRSALQDVRPSLTKEQIDWYHSYEANRLR

SEQ ID NO: 23170 - protein, 1072 aa, Anopheles gambiae str. PEST
IHCKKNVPLSESVCTMHRKTSPFPYDPMIIPRVKQYLEENVHQTYVDTGVMARELQQRYREYNRRKANPFRLLVEEAYRTVLHSYGLDSNPSSEVEEEAGSDVEVMDESAQRNQMSNTLTSMYMNNRARAAGGGGPPVPDQSGSGAAGDAIDISSDEEEGEGGGGGGEGEGGSKKATEAVSESVSGARDDDTSNGSVESVGNGGEKFPPLSKRRRLELANSGGLVAGATNGQASRHPAGSGSKASHKPTNEQHNQQAGSGTPATPAAASSSAAGGQRSKKFRKEIVPRMVDITFDDVGGMDHILKNLCELLLHVIHPEIYRYLGLPPPRGFLLHGPPGSGKTLLAQAIAGQLNVRLIEVPATELVAGVSGESEERIRDVFEQAASLSPCVLFIDEIDAISSNRVNAQKDMERRIVAQLLSSMDALGKQEGGEGVIVIGATNRADALDPALRRVGRFDQEISLGIPDREARKQILRIICWKLRISDTIDYGELAKLTPGYVGADLLALAIRAANNAIKRLFTEREWKLLQQEPEQIADEDVVAIDDEPEEVVNLDDDKDEPKEAETKPADATTEAGTSKAAESTAEESKNEPEQGVADSTQITEPVAPVEPDAATAPTETTTETEPAAAASSEKTQEKVTTNDADAEKMDVDSDQLPTASTVEPPVDTAVAEAEKQVTVEQSDIAMEETKSDNQTTEQAESSTTRVVPAEEAPKEADGADTTVSKPSSVPQKQELTLQQLLDLLLNQQNALPVTKLEGLCIERDDFIEALKTVQPSAKREGFITVPDVTWNDIGSLGDIREELKLAILAPVKFPHRLKLLGLTAPSGVLLCGPPGCGKTLLAKAVANEAGINFISVKGPELLNMYVGESERAVRQCFQRARNSAPCVIFFDEFDSLCPKRSDTAEGSAGTRVVNQLLTEMDGIEERKGVFLMAATNRPDIVDPAVLRPGRLDKILYVGLPAKEDRVDILRALTKNRTQPRLADDVELEKVAELTEGYTGADLAGLVRQASLQTLKDSIVASSLQEETAGGETNAEDELSLMVRFEHFTQAIRNIKPSVTAEDKKHYEKLRLKY

SEQ ID NO: 23171 - protein, 836 aa, Anopheles gambiae str. PEST
KMAETLGKRWRLLLYIARLRYPRYPAYYFPVFVLLQGLKKLRSDLKLRLLDFYLQPIPNVLFEQLQSDQLVASEHTLFVSPTVFREYVVEREINWINLVLKVAKCSEQVEPTPQDKSLVSIILNKQDVSLLCQVAPHADVPLNALWVKENLVENLNERYTRHTGERYWARLQRITEGQHLPAIVAKANIFLYQTPYDLSSDMVDFILGRYFETPRLLYRNHTYQVPLTERFLGNTFYTKHFAVLVHMRSLWFKCLNLDSTAGAFEMSGIAQKSLTTLQQTTTYNNFLLPERFDGPYMRPSCPFGLRKYFHSLRSSLQAYLKMENNGLVRNGIYPVFMLRGERGIGKMAVLRSVASALGIPIYYADCSEIMTSISSQTETKLSTAFNKAKVCEPLIICLENFEVFGVDNEGHEDQRITGSFQAELMTLFGRQYSHPVVVVAVANQKESNTPKLTSLFLEVIQLHAPTTAERLELLRWISLGHRYRLPVAQLQKIAEQSQGFTLADLELLYGNALEAWRRSQDTGRVGLNHFLALLDHMQSTFSDSLGAPKVPKVLWSEIGGLAKLKSEIQNSIGLPLRHKHLMGKNMRRSGILLYGPPGTGKTLIAKAVATECNLSFLSVQGPELLNMYVGQSEQNVREVFARARTASPCVLFLDELDSLAPNRGVSGDSGGVMDRVVSQMLSEMDGISKDPGQQIFILAATNRPDLIDPALLRPGRFDKLLYVGPSCTVEDKESVLRAVTGRFRLAETLTLRKIAESLKQDMTGADMYSICSNAWLSAVRRTVKEAIAGDSIDEGLNADQVIVTEDDFKESVKKFIPSISPADMAYFNQLKGNFSA

SEQ ID NO: 23172 - protein, 870 aa, Giardia lamblia ATCC 50803
MDNKSICSKFNNRFIVNDNPGGDDSQIILSSEKVNVLDLFQGDYVRLKGRFGKTTHAMVQSREDVDKIVVLMNKTMRANLGVNLGDIVILYPAQNLPYHKRIKVIPFEQDLEGLNIAGYTVKQGEDGKPAPAPFPGPTYDLFDICIAPYFKDKCRPVTEGNTFKVMTTSLPVNREIEFKVVLTDPSPACIVMDGGEIFYEGEPIDRDEHERENTKVGYSDLGGLGKELGMIREQIELPLRHPELFKYLGVKPPRGILLTGPPGCGKTTIGKAIANEAGAYFFLLNGAEIMSSMAGESEKNLRKAFDICEQEAEKSAKENDGVGCAILFIDEIDCIAGNRAESKGEVEKRVVSQLLTLMDGIKPRSNVIVLAATNRPNVIDPALRRFGRFDREIQINVPDENGRLEILSIHTRKLKLHPDGVDIVRIANETNGYVGADLAQICTEAAMMCVRESMEMVLDMESEEKLTDEQLNKIFITDSHFTAAISKVTPSTLRETVIEMPTVTWDDIGGLEHTKRELIELIQYPIRYKEKYQQMGIEPSRGALLWGPPGTGKSLLAKAIANECGCNYISIKGPELLSKWVGESEQNIRNIFDKARQAAPCVLFFDEIESITQHRGTSASGGGEVTDRMLNQILTELDGVGVRKDVFIIGATNRPDTIDSALMRPGRLDTLIYIPLPDYPSRVAVLKAHLRKSKVNEKEVSLEQIAQVTDGYSGADLAEICSRACKYSIRENVEGFSRAMSAFESMKKSWLDSHGGVLTPEKEKEFAEHEEKISERFSDTSISGRHFEQAIRESRKSISEEEMRRFEVFKQSYSGGIGDGLGSMGNAGRRNANPAIANFSFKVDGQTGARQQPQGAVRSKAGAGNEADMF

SEQ ID NO: 23173 - protein, 339 aa, Giardia lamblia ATCC 50803
MQSSNILDGMAKSMITLNDFLFATQSLIPTALREGFATVPDVSLDDIGALDFLKAELDRYLLQPLKNPERFERLGLNRFSGIIMFSVPGQGKTLICKALSAKAEINFISVKGPELLNMYYGESERAIRNVFARARASAPCILFLDEFDSLAKRRGSGGSSSDVSDKVVNTLLTELDGLHNNLSGEHSLNAKNAQDQIFIIAATNRIDIIDPGLLRPGRFDKIIYIPLPNLEDRVNILYTIITRRQISLDKSLQNPQDLREFLTEYLAKQTKGCTGADLEGLVRRAAMAVIAESQTGTEICKRHFMTALSQTKASVNEEDRIKYDMMAAHYSKLCISENK

SEQ ID NO: 23174 - protein, 796 aa, Pyrococcus furiosus DSM 3638
MSEKKKEVKLKVASAYQRDVGRGIVRIDRETMRELGISPGDVVEIIGTKNTAAIAWPAYPEDEGLGIIRMDGTIRKNAGVGLGDEVIVRKADVKEARKVVLAPTEPIRFGRDFIEWLHERLIGRPVVRGDYIKVGVLGQELTFVVTTTQPAGVVQITEFTDFDVSERPVKEVEKRITTGVTYEDIGGLKDVIEKIREMIELPLKHPELFEKLGIEPPKGVLLYGPPGTGKTLLAKAVANEANAYFIAINGPEIMSKYYGESEERLREVFREAEENAPAIIFIDEIDAIAPKREEVTGEVEKRVVAQLLTLMDGLKSRGKVIVIGATNRPDAIDPALRRPGRFDREIEIGIPDKQGRKEILQIHTRGMPIEPDFRKDDVLKILEELRGEEKFKDVIDRAIDQVSKAKEEEIQQVLKRISQDLYEEVKARLIDKLLEELAEVTYGFVGADLAALAREAAMAALRRLIREGKIDFEAETIPREVLEELKVTRRDFYEALKMVEPSALREVLIEIPNVHWDDIGGLEEVKQQLREAVEWPLKYPEAFRAFGITPPKGILLYGPPGTGKTLLAKAVATESQANFIAIRGPEVLSKWVGESEKRIREIFRKARQAAPAIIFIDEIDAIAPTRGTDVNRVTDRIINQLLTEMDGIVENSGVVVIGATNRPDIIDPALLRPGRFDRLILVPAPDEKARLEIFKVHTRGMPLADDVDLKELARRTEGYTGADIAAVCREAALNAMRRALEQGIIKEGMKADEIRKVAKVTMKDFEEALKKIGPSVSKETMEYYLKVQEKFKQARG

SEQ ID NO: 23175 - protein, 837 aa, Pyrococcus furiosus DSM 3638
MIIGRGEERKEEIKLRVAEALKWDVGRGIVRFDKKYQRMLGVEPGDIVEIEGNRITAAIVANAHPDDRGLDIVRMDGYIRKNAGVSIGDYVTIRRAEVKEAKKVVLAPAQKGVYIQIPGDLVKNNLLGRPVVKGDIVVASGRSEFYTGTPFDEIFRGFFEMSMGFGELKFVVVSTVPRGIVQITYNTEVEVLPQAVEVREEKVPEVTYEDIGGLKEAIEKIREMVELPLKHPELFERLGIEPPKGVLLYGPPGTGKTLLAKAVANEANAYFIAINGPEIMSKYYGESEERLREIFKEAEENAPAIIFIDEIDAIAPKREEVVGEVEKRVVSQLLTLMDGLKSRGKVIVIAATNRPDAIDPALRRPGRFDREIEVGVPDKQGRKEILQIHTRGMPIEPDYDKESVIKALKELEKEEKYEKSEIKKIIEEISKATSEEEVKEILKKHGKIFMDVRAKLIDKLLDELAEVTHGFVGADLAALAREAAMVVLRRLIKEGKINPEAESIPREVLEELKVTRRDFYEALKMVEPSALREVLIEIPNVHWDDIGGLEEVKQQLREAVEWPLKYPKAFKRLGISPPKGILLYGPPGTGKTLLAKAVATESQANFIAIRGPEVLSKWVGESEKRIREIFRKARQAAPAIIFIDEIDAIAPARGGYEGERVTDRLINQLLTEMDGIQENSGVVVIGATNRPDIIDPALLRPGRFDRLILVPAPDEKARLEIFKVHTRGMPLADDVDLKELARRTEGYTGADIAAVCREAALNALRRVVKSVPKEELEEESEEFLDKLIVTRKDFEEALKKVKPSVNKYMMEYYRQFEESRKRISGESMGREPDYFTG

SEQ ID NO: 23176 - protein, 732 aa, Methanothermobacter thermautotrophicus str. Delta H
MGCMTKKEIKLKVAEALAQQDVGRGIARVDPACMEKLGLSDGDIIEIEGKKLTAATVVSSQSDIGLGIIRIDGYLRKNAGASIGEEVTVRRADVKDAQKVVLAPVDQEVIIRGDIRSAFLNRVLVKGDIIVSGIRQHISGGGLFDEFFRDFMDISPLGEIKLAVVSTSPAGVVRVTPSTQVEMQQKPVDVSKLEGVKNLVDVTYEDIGGLKEEVKKVREMIEIPLKRPELFERLGITPPKGVLMHGPPGTGKTLLAKAVANESDAHFIAINGPEIMSKYVGGSEERLREFFEEAEENAPSIIFIDEIDAIAPKREDVSGEVERRIVAQLLTLMDGLKSRGQVVVIGATNRPDALDPALRRPGRFDREIEIGVPDREERKEILQIHTRGMPLADDVDLDELAEITHGFVGADLESLCKESAMRVLRRVLPEIKADEEIPKEVLKKMVVTRADFKDALKEIQPSALREVLVQVPNVSWDDIGGLEGAKQELREAVEWPLKYPDRFKKFGIRPPKGILLHGSPGTGKTLLAKAVANESQANFIAVKGPELLSKWVGESEKGVREVFRKARQTAPTVIFFDEIDSIASVRSGSTADSGVTQRVVNQLLTEIDGLEELQDVAVIAATNRPDILDPALLRPGRFDRHVKVEDPDKEARLAIFRVHTKDMPLADDVDLEKLAEKTEGYVGADIEAVCREAAMLTLRDNMDAEEVSMKYFLEAMEKVKPKGGVEEQVQYH

SEQ ID NO: 23177 - protein, 753 aa, Methanosarcina acetivorans C2A
MTEEMNLRVAEAYHKDVGRGIARIDTRLMQEMGLVSGDIIEISGRSKTYAIVWPNVERGQENRIRIDGNLRSNAKVGIDDRVTIQKVQAKHAQRVTLAPSQPVRLVGGAHYILRIIEGRPLNKGQQIRVETVNNPLTFVVASTRPAGPVVVTKDTEIVIKEKSIEEIKTPEGISYEDIGGLRREIQLVREMIELPMRHPELFQKLGIEPPKGVLLHGPPGTGKTMIAKAVASETDANFITISGPEIVSKYYGESEQKLREIFDEAEKDAPSIIFIDEIDSIAPKRGEVTGEMERRVVAQLLSLMDGLKSRGEVVVIAATNRPNSIDEALRRGGRFDREIEIGIPDRNGRRQILLIHTRGMPLEDEVSLGEIADVTHGFVGADLSSLCKEAAMHALRRITPEIDIEEEIPQEIIDNLVVTKEDFREALKNIEPSAMREVYVEVPHVGWDDIGGLDKAKQELIESVEWPLKYPEMFKAVNIKPPRGVLLFGPPGTGKTLLAKAVASESEANFISIKGPELLSKYVGESERAIRETFRKAKQAAPTVIFFDEIDSIAPERSSVSDTHVSERVVSQILTELDGVEELKDVIIVAATNRPDMVDPALLRPGRFDRLIYIKPPGKEGREKIFEIHTKGKPLAEDVKLSELAEMTEGYVGADIEGICREAAMLALREIVTPGTDRKSIKEKAGDVRLSKRHFERAIRRVRPTTSRETLSAYEKSAELFARYAAELEEESSEAKEEEKEIEGKEVPNFPKV

SEQ ID NO: 23178 - protein, 786 aa, Methanosarcina acetivorans C2A
MEEIQLKVEKAYPIDLGRGIIRLDPAALLKLQLSPGDIVEIRGKKKTTAKVWRADRQDWEQGIVRIDNFIRQNAGVSIGEKVTIKKVEAPEAKKLILALPESMTQGGPELQFGEHANEIIKRHILKRPVFKGDIIPIINSMSQPMTESLTTSQVIPLVAVETDPANTIVLITEATIIELRKKPVQGYEKATRGVTTYEDIGGLGQEIMRVREIIEMPMKHPELFAHLNIEPPKGVILYGPPGTGKTLIAKAVANESGASFHYIAGPEIVGKFYGESEERLRKIFEEATQDAPSVIFIDEIDSIAPKRENVTGEVERRVVAQLLTLLDGMEERGQVVVIGATNRVDAIDPALRRPGRFDREIHIGVPDTKDRYEILQIHTRGMPIEKDDEITPAESEVELEEATEIEAEIEVDEAALEREKKEKTNRYLMYLAEKTQGFVGADLLALVQEAAMRCLRENLPDLDLEKETIPPERLEKIVVTKKNFEDALMEAEPSALREIFVEMPSVGWDGVGGLDEAKNAIIEAVEWPIKNPEKFVKLGIKAPKGILLYGPPGTGKTLIAQAVAKESNANFISVKGPEMFSKWLGESEKAIRETFKKARQVAPCVVFFDEIDSIAAMQGMESTDSRTSERVLNQLLTEMDGLETLKDVVIIAATNRPNLLDPAIMRPGRFDRLVYVGAPDRKGRMKIFKIHTRNTPLAEDVDLENLANITEGYVGADIEAVCREAVMFALRENFDVEAIEMRHFREALKKVKPTINENIAQFYEKIEEQFKGGQRPAETAGYVGYR

SEQ ID NO: 23179 - protein, 764 aa, Methanosarcina acetivorans C2A
MTEEDKSTIKLKVAEADQRDVGKGIVRIDERFREKLGLKPFDVVEIKGGKSTSALIGRPYPSDAGLDIIRMDGLIRTNAKTSIGEYVDIRKADWKEAKSVTFAPVAQGMQIYAPSETLKAVFMNRTVSKGDFISTTSLRRSRERETFGKGVMFEDFFQDFFGQGFGPSFGLGEIKLQVVSTAPAGIVKITDMTQVELLPEAMEIISEQNIPTVMYEDLGGLKDAISKVREMIELPLKHPELFDRLGIDAPKGVLLQGPPGTGKTMLAKAVANESDAYFISINGPEIMSKYYGESERAIREIFEDAEKNAPAIIFLDEIDSIAPKRAEVTGEVERRVVAQLLSLMDGLKARKNVIVIGATNRPEALDIALRRPGRFDREIELRVPDTEGRLEIFQIHTRGMPLADNVNLMDFAQITYGFVGADIAALCREAAMSALRRILPKINLNEPEISKEILDALQVTREDFENALKDVQPSAIREILIEVPNVSWEDVGGLERVKELLKEVVEWPLKNPESYRDIGVEAPKGVLLYGPPGTGKTLLAKAIAHESDANFITAKGSDLLSKWYGESEKRIAEVFTRARQVAPSIIFLDELDSLAPIRGTSVGEPQVTARILNQLLSEMDGLEELRAVVVIGATNRPDIIDPALLRPGRFDELILVPVPDEGARREIFRVHTKNMALAEDVDIEKLVSFTDQYTGADIAAVCKKAGRHALREDLHAKKVRQKHFLQAIEETGPSVTPDTMKYYEAIKGELRKRKSKEIENPYYV

SEQ ID NO: 23180 - protein, 1249 aa, Methanopyrus kandleri AV19
MPGLPIKLRVEKAYPEDVGKRAVRMDKASRDRIGVSEGDLVKITGSKTTVARVLPAKKEDVGKGIVRMDKYERQNAGASVGEPVEVDRAEEKVAKRVELMPTERVVVPVQAGLKEEVEEELTREHEQDILEQIKRYLRSRAQQTPIPATHRDVIPLEVQGKTIAGHVLIKFPDSLLVVGIEPEDATVIGPETEIEVKPYSEDLAKAAEIPDVTYDDIGGLDREIELIREYVELPLKRPELLKELGIKPPKGVLLYGPPGTGKTLLAKAVANECGAKFYSINGPEIMSKYYGESEARIREVFEEARKNAPAIIYIDEIDAIAPKRGETGEVERRVVAQLLTLMDGLSEDERVVVLASTNRPDDIDPALRRPGRFDKEIEIGVPDKEGRKEILQIHTRDMPLADDVDLDKLAELTHGFTGADLEALCKSAGLKALRRAIRKIGAKLAEKGEKEEREVAVKVSELSDEELMEVLEKGLDRARIPEEKKRALRRVLREAEEEEKEEVAYTDALDKVLEAEELPEIREELKVTMRDFMEALKEIEPSALREVIVEVPDVSWDDVGGLEDVKQELKEAVEYPLKYPEVYEKLGTRPPKGILLYGPPGTGKTLLAKAVANESDANFIAVRGPEVLSKWVGESIPGDEVVWAKVDGEAKLIPIEDLYELWKEGRDVEVAALTEEGVVWSSVDRVARHRRRTGLVKIITRTGREVIVTEDHSVFTVRDGKIVDVPTSELSEGDWIVLPARLPAGDSDEIDGIKIDEDLAFLLGLYVAEGSLTNQKDAVRIHNKDPEVIEEIDRIVREKGWEGRYYESDHSYWIKSRKLRQLCEKLGTKAREKRLGPLLSLKPELLAAALRGYYTGDGSFSVKPHGRSAIIEATTVSKRLADELLVALQILDIVARRYECDDTKGSTRYRVMITKSEYIRTFVEKVGFAQSEKNERIRKFLAERKWTRGRSDIPTELIGSPYTYVEVEYISDRVAADGGLMKAELEHLYFDKIKEIVPLDRDDEYVYDVVEVKLGHNFVGGQGVLLHNSEKKIREIFQKARQTAPCVIFFDEIDAIAPKRGTEVGGSRVTERIVNQLLTEMDGIEATEDVFVIAATNRPDIIDEALLRPGRFDRIVYVPPPDEEAMKEIVKIHTRDMPLAEDLTVDDIVEILRRREREEDAKYTGADIEAVCMEAAMLALREVLDELERIEKESETEEELEARKEALLEELRVERRHFEKAVEKVPPSVPKEKLEEYEKLKEEYQRLAG

SEQ ID NO: 23181 - protein, 751 aa, Methanosarcina mazei Goe1
MTEEINLRVAEAYHKDVGRGIARIDTRLMQEMGLVSGDIIEISGRSKTYAIVWPNVERGQENRIRIDGNLRSNAKVGIDDRVTIQKVQAKHAQRVTLAPSQPVRLVGGAHYILRIIEGRPLNKGQQIRVETVNNPLTFVVASTRPAGPVVVTKDTEIIIKEKSIEEIKAPEGISYEDIGGLRREIQLVREMIELPMRHPELFQKLGVEPPKGVLLHGPPGTGKTMIAKAVASETDANFITISGPEIVSKYYGESEQKLREIFEEAEKDAPSIIFIDEIDSIAPKRGEVTGEMERRVVAQLLSLMDGLKSRGEVVVIAATNRPNSIDEALRRGGRFDREIEIGIPDRNGRKQILLIHTRGMPLEDEVSLSEIADVTHGFVGADLSSLCKEAAMHALRRITPEIDIEEEIPQEIIDNLVVTKENFREALKNIEPSAMREVYIEVPHVGWDDIGGLEKAKQELIESVEWPLKYPEMFKAVSIKPPRGVLLFGPPGTGKTLLAKAVANESEANFISIKGPELLSKYVGESERAIRETFRKAKQAAPTVIFFDEIDSIAPQRSSVSDTHVSERVVSQILTELDGIEELKDVIIVAATNRPDMVDPALLRPGRFDRLIYIKPPGKEGREKIFEIHAKEKPLAEDVKLSELAEMTEGYVGADIEGICREAAMLALREIVTPGADRKNIQEKAAEVRLSKRHFEKAIRRVKPTTSRETLSAYEKSAELFARYATEFEEESSEEKDQEIKVEEKDQETRV

SEQ ID NO: 23182 - protein, 792 aa, Methanosarcina mazei Goe1
MEEIQLKVEKAYPIDLGRGIIRLDPTALLKLQLSPGDIVEIRGKKKTTAKVWRADRQDWEQGIVRIDNFIRQNAGVSIGEKVTIKKVEAPEAKKLILALPESMTQGGPELQFGEHANEIIKRHILKRPVFKGDIIPIINSMSQPMTESLTTSQVIPLVAVETDPANTIVLITETTNIELRKKPVQGYEKATRGVTTYEDIGGLGDEIMRVREMIEMPMKHPELFAHLNIEPPKGVILYGPPGTGKTLIAKAVANESGASFHYIAGPEIVGKFYGESEERLRKIFEEATQEAPSVIFIDEIDSIAPKRENVTGEVERRVVAQLLTLLDGMEERGQVVVIGATNRVDAIDPALRRPGRFDREIHIGVPDTKDRYEILQIHTRGMPIEKDEESVTGEPAPEVEIGALDEFEVETGTEIEVDEAAMEREKKEKTNLYLMSLAERTQGFVGADLLALVQEAAMRCLRENLPDLDLEIDTIPPERLEKIVVTKKNFEDALMEAEPSALREIFVEMPSVSWGDVGGLDEAKHSIIEAVEWPIKNPEKFVKMGIKAPKGILLYGPPGTGKTLIAQAVAKESNANFISVKGPEMFSKWLGESEKAIRETFKKARQVSPCVVFFDEIDSIAGMQGMESTDSRTSERVLNQLLTEMDGLETLKDVVIIAATNRPNLLDPAILRPGRFDRLVYVGAPDRKGRLRIFKIHTQNTPLAEDVNLENLADTTEGYVGADIEAVCREAVMFALRENFDIEAIEMRHFREALKKVKPTINENIAQFYEKIEEQFKGGQRPVETAGLVGYR

SEQ ID NO: 23183 - protein, 764 aa, Methanosarcina mazei Goe1
MTEGDKSTIKLKVAEADQRDVGKGIVRIDEKFREKLGLKPFDVVEIRGGKSTSALIGRPYPSDSGLDIVRMDGLIRMNAKTSIGEYVDIRKADWKEAKSVTLAPVAKGMQIYAPSETLKAVFMNRTVSKGDFISTTSLRRSRERETFGKGVMFEDFFQDFFGQGFGQSFGLGEIKLQVVSTSPSGIVKITDMTQVELLPEATEITPEQNIPTVMYEDLGGLKDAIGRVREMIELPLKHPELFDRLGIDAPKGVLLHGPPGTGKTMLAKAVANESDAYFISINGPEIMSKYYGESERAIREIFEDAEKNAPAIIFLDEIDSIAPKRAEVTGEVERRVVAQLLSLMDGLKARKNVIVIGSTNRPEAIDIALRRPGRFDREIELRVPDTEGRLEIFQIHTRGMPLADNVNLMDFAQITYGFVGADIAALCREAAMSALRRILPKINLNEPEIPGEILDSLQVTREDFENALKDVQPSAIREILIEVPNIGWDDVGGLGEVKELLKEAVEWPLKSPESYRNIGVEAPKGVLLYGPPGTGKTLLAKAIAHESDANFITAKGSDLLSKWYGESEKRIAEVFTRARQVAPSIIFLDELDSLAPVRGASTGEPQVTARILNQLLSEMDGLEELRAVVVIGATNRPDMIDPALLRPGRFDELILVPVPDEGARREIFRVHTENMALAEDVDIEKLVSLTDQYTGADIAAVCKKAGRYALREDLHAKSVRQKHFLQAIEETGPSVTPDTMKYYQAIRGELRKRKSKEIESPYYI

SEQ ID NO: 23184 - protein, 526 aa, Corynebacterium efficiens YS-314
MGDMASSTDPAAHNSFSDFNREEMTRLADNVRSLQRTNQDLSARNTKLAEMLKSSRDKLSMMYQQLEDMAQPPSLYGTFLEMSKDGTNAEIFAGGRRMRVAMSPMLCAGDLMPGVQVRLGEGNQILEACDFEQTGDLATLMEMIGRDRALISDRSGEERVVKLAGPLMDRTRKLPRPGDTLLVDRRAGYAFENIPKTEISKLALEEAPDVSYVDIGGLDDQIELIQDAVELPFLHPEMYRSYKLHPPKGVLLYGPPGCGKTLIAKAVANSLSQRIGDAGTSYFINVKGPELLNKYVGETERQIRVIFERARELAGDGRPVIIFFDEMESIFRTRGSGISSDMETTVVPQLLAELDGVEDLSNVIVIGATNREELIDPAILRPGRLDIKIRVQRPNRSGARDIFARYITDAIPLAAPVDELIDTAVDHLFTPRPYVRLTLIDGTVETLNYHDFVSGAMIANIVDRAKKSAIKDHIDGRTTGLSAEHLIHAIDQENQQSEDLPNTSNPDEWTRIIGRQGKRVAEVEVV

SEQ ID NO: 23185 - protein, 639 aa, Trichodesmium erythraeum IMS101
MNNFFGLDVKDLVELAKTLEEKAKSGEIKTSFEVQSGPMRNIPRHGNIPRGMGRSNYQAQTGQSSQDTNFTVQSPNKDSVTQNRAQEKTNSTTSSPETKLRPTLRDIGGMSEVIQELREVIELPLKRPDLLTKLGLEPSRGVLLVGPPGTGKTLTAKAIAEELGLNYIAINGPEVMSKYYGEAEGKLRDIFAKAKKSAPCLIFIDEIDSIAPDRSKVEGEVEKRLVAQLLGLMDGFEVLEGVLLLAATNRPDHIDPALRRPGRFDQEVYFHVPDRDGRSEILQILTKAMPLDNSVDLEEIADLAVGLVGADLKAVCQKAAYFALRREVPSLENLNIQTPEDMSLLQSDLLRAIKEIKPSILRSVAVEVPNVSWQHIGGLDVVKQKLQESVEGALLYPELYEKTKAKAPKGILLWGEPGTGKTLLAKAVASQAQANFIAVNGPELLSKWVGAAEEAVRELFSKARQVSPCVIFIDEIDTLAPARGKTMGDSGVSDRLVGQLLTELDGLRDCTQLLLVGATNRPDALDPALLRAGRLDLQIKVDLPDQASRLEILKVHNQDRPLEEVNLEDWASRTEGWNGADLALLTNQAALAAIRSYSAQGIKSSKENDIKITSADFENAYNALKSQKQSNNFDSDICV

SEQ ID NO: 23186 - protein, 903 aa, Methanocaldococcus jannaschii
MVKELKVAEAYQGDVGRGIARIDPYTMEELGLKPGDVIEIEGPKGKAYAIVYRGFLEDAGKGIIRIDGYLRQNAGVAIGDRVKVKRVEIKEAKKVVLAPTQPIRFGPGFEDFVKRKILGQVLSKGSKVTIGVLGTALTFVVVSTTPAGPVRVTDFTHVELKEEPVSEIKETKVPDVTYEDIGGLKEEVKKVREMIELPMRHPELFEKLGIEPPKGVLLVGPPGTGKTLLAKAVANEAGANFYVINGPEIMSKYVGETEENLRKIFEEAEENAPSIIFIDEIDAIAPKRDEATGEVERRLVAQLLTLMDGLKGRGQVVVIGATNRPNALDPALRRPGRFDREIVIGVPDREGRKEILQIHTRNMPLAEDVDLDYLADVTHGFVGADLAALCKEAAMRALRRVLPSIDLEAEEIPKEVLDNLKVTMDDFKEALKDVEPSAMREVLVEVPNVKWEDIGGLEEVKQELREAVEWPLKAKEVFEKIGVRPPKGVLLFGPPGTGKTLLAKAVANESGANFISVKGPEIFSKWVGESEKAIREIFRKARQSAPCIIFFDEIDAIAPKRGRDLSSAVTDKVVNQLLTELDGMEEPKDVVVIAATNRPDIIDPALLRPGRLDRVILVPVPDEKARLDIFKIHTRSMNLAEDVNLEELAKKTEGYTGADIEALCREAAMLAVRESIGKPWDIEVKLRELINYLQSISGTFRAAAVELNSVIKATKERESAEAGEFSELKNAIGKIISVLSPAKEKIEAVEKEIDKFLEVINKEELKPSEKDEAQKLAKYLKDILGKLKEMIDNIYELENKLNTLKEQVSAEEIDEIIKTTQNIIQRFTTSLDELKNILKDIESIRLKVSTKDVKIKKEHFMKALEKIKPSVSKEDMRVYEKLAQEYGRATSVEKKKEEGKEVI

SEQ ID NO: 23187 - protein, 775 aa, Methanosarcina barkeri
MEEIQLKVEKAYPIDLGRGIIRLDPTTLLKLQLSPGDIVEIRGKKKTTAKVWRADRQDWDQGLVRIDNFIRQNAGVSIGEKVTIKKVEAPEAKKLVLALPESMMQGGPELQFGEHANEIIKRHILKRPVFRGDIIPIINSMSQPMTESLTTSQVIPLVAVETEPSNTIVLVTEETLIELRKKPVQGYEKATRGVTTYEDIGGLGAEIMRVREMIELPMKHPELFGHLNIEPPKGVILYGPPGTGKTLIAKAVANESGASFHYIAGPEIVGKFYGESEERLRKIFEEATQDAPSVIFIDEIDSIAPKRENVTGEVERRVVAQLLTLLDGMVERGQVVVIGATNRVDAIDPALRRPGRFDREIHIGVPDTKDRYEILQIHTRGMPIERDEETEEIGKVETEADEAALERERKEKADKYLMYLAERTQGFVGADLLALVQEAAMRCLRENLPDLDLEKEAIPPERLEKIVVTKRNFEDALMEAEPSALREIYVEMPTVSWNDVGGLDEAKQSITEAVEWPIKNPEKFSHMGIKAPRGILLYGPPGTGKTLIAKAVAKESNANFISVKGPEIFSKWLGESEKAIRETFRKARQVAPCVIFFDEIDSIASMPGMESTDSHTSERVLNQLLTEMDGLESLRDVVVIAATNRPNLLDPAILRPGRFDRLVYIGSPDRKGRLKIFRIHTKDTPLAENVNLETLADETEGYVGADIESVCREAVMIALRENFDTEYVEMRHFREALKKVKPTITENIAQFYEKIEAQFKGGQRLTETAGYIGYR

SEQ ID NO: 23188 - protein, 365 aa, Methanosarcina barkeri
MPLAENVNLMDFAQITYGFVGADIAALCREAAMSALRRVLPKINLNEPEIPAEILDSLQVIREDFENALKDVQPSAIREILIEVPTVGWDDVGGLEEVKRLLKEVVEWPLKNPESYRDIGVEAPKGVLLYGPPGTGKTLLAKAIAHESDANFITAKGSDLLSKWYGESEKRIAEVFTRARQVAPSIIFLDELDSLAPIRGASISEPQVTARILNQLLSEMDGLEELRAVVVIGATNRPDVIDPALIRPGRFDELILVPIPDEGARREIFKVHTEKMELAEDIDIEKLVSITDQYTGADIAAVCKKAGRLALREDIHAKNVKQRHFLKAITETGPSVTPDTMKYYEAIKGELRTRKSKEIENPSYI

SEQ ID NO: 23189 - protein, 307 aa, Methanosarcina barkeri
METVNNPLTFVVASTRPAGPVVVTKDTDIVIKEKSAEEIRVPEGISYEDIGGLRREIQLVREMIELPLRHPELFQKLGIEPPKGVLLHGPPGTGKTLIAKAVASETDANFITISGPEIVSKYYGESEQKLREIFEEAEKEAPSIIFIDEIDSIAPKRGEVTGELERRVVAQLLSLMDGLNSRGEVVVIAATNRPNSIDEALRRGGRFDREIEIGIPDRNGRKQILLIHTRGMPIQDVSLSEIADVTHGFVGADLSSLCKEAAMHALRRITPEIDIEEDEIPQEILDKLVVTKDDFKEALKEISSRLQ

SEQ ID NO: 23190 - protein, 414 aa, Methanosarcina barkeri
MEIRGGKSTSALLGRPYPSDSGLDIIRMDGLIRTNAKTSIGEYVDIRKADWKEARSVTLAPVAKGMQIYAPSETLKAIFMNRTVSKGDFISTTSLRRSRERETLGKGIMFEDFFQDFFGPGMGQSFGLGEIKLQVVSTSPSGIVKITDMTEVELLPEAAEITPEQNVPTVMYEDLGGVKEAITKIREMIELPLKHPELFDRLGIDAPKGVLLYGPPGTGKTMLAKAVANETDAYFISVNGPEIMSKYYGESEKGIRDVFEDAEKNAPAIIFLDEIDSIAPKRAEVTGEVERRVVAQLLSLMDGLKARKNVIVIGSTNRPEAIDMALRRPGRFDREIELRVPDTEGRLEIFQIHTRGMPLAENVNLMDFAQITYGFVGADIAALCREAAMSSLRRILPKINLNEPEIPSEILDTL

SEQ ID NO: 23191 - protein, 279 aa, Methanosarcina barkeri
MSWEDVGGLEGVKQLLKEAVEWPLKSPESYRDIGVEAPKGVLLYGPPGTGKTLLAKAIAHESEANFITAKGSDLLSKWYGESEKRIAEVFSRARQVAPSIIFLDELDSLAPIRGAAIGEPQVTARILNQLLSEMDGLEELRAVVVIGATNRPDIIDPALLRPGRFDELILVPVPDAGARKEIFRVHTAKMSLAEDVDIDKLVSMTDQYTGADIAAVCKKAGRDALREDLHAKEVKQKHFLQAIAETGPSVTPDTMKYYQAVQSGLRKRQSKEIETPFYT

SEQ ID NO: 23192 - protein, 742 aa, Halobacterium salinarum
MNEVQLEVAKAYPNDSGRGIARLDPDTLLHLKLSPGDIIDIEGAETTAAKVWRADRQDWNTDTIRIDGFTRQNAEVGIGERVKIRKADAEKADTLVLAPPEEASVQFGSDAAGMVKRQILKRPVVARDIVPVMSSTNHPFMRSPGQAIPLIAVETEPEGVCLVTEDTDVELREEPISGFERTGGGITYEDIGGLENEIQRVREMVELPMKHPQIFQKLGIEPPQGVLLHGPPGTGKTLLAKAVANETSASFFSIAGPEIISKYYGESEQQLREIFEDAKDDSPSIIFIDELDSIAPKREDVTGEVERRVVAQLLTMMDGLEGRGQVIVIAATNRVDAVDPALRRPGRFDREIEIGVPDEIGREEILKIHTRGMPLSDDVNLSTLADDTHGFVGADIESLSKEAAMRALRRYLPEIDLDEEDIPPSLIDRMIVKREDFKGALSEVEPSAMREVLVELPKITWDDVGGLTEAKNNVKESVEWPLNQPEKFTRMGVEPPAGVLLYGPPGTGKTLMAKAVANETNANFISVRGPQLLSKWVGESEKAIRQTFRKARQVAPTVIFFDELDSLAPGRGQTGGNNVSERVVNQLLTELDGLEEMEEVMVIAATNRPDIIDPALIRSGRFDRLVQVGQPGIEGREQILKIHTQDTPLAADVSLRELAERADGYVGSDLANIAREAAIEALRDDEDADDVGMAHFRAAMENVRPTITDDLMEYYDQVEDQFKGSQGPNVNSRQGSEHIGFQ

SEQ ID NO: 23193 - protein, 733 aa, Archaeoglobus fulgidus DSM 4304
MSDKKGEEITLRVAEAFYRDVGRGVARIDPAVMEKYGLQSGDIIEIIGKSTVPAIVWPSYPEDRGTGIIRIDGSIRSNAGVGIDDKVRIRKVTAKPAEKVTLAPTEPVRLMGGEAYLLRLLEGRPVIKGQKIRVEVFGHTLTFVITATRPSGVVVVTRNTAIELKEKPAEEVKRAVPDVTYEDIGGLKRELRLVREMIELPLKHPELFQRLGIEPPKGVLLYGPPGTGKTLIAKAVANEVDAHFIPISGPEIMSKYYGESEQRLREIFEEAKENAPSIIFIDEIDSIAPKREEVTGEVERRVVAQLLALMDGLEARGDVIVIAATNRPDAIDPALRRPGRFDREIEIGVPDKEGRKEILEIHTRKMPLAEDVDLEELAELTNGFVGADLEALCKEAAMHALRRVLPEIDIEAEEIPAEVIENLKVTREDFMEALKNIEPSAMREVLVEVPNVKWEDIGGLEHAKQELMEAVEWPLKYPEVFRAANIKPPRGILLFGPPGTGKTLLAKAVANESNANFISVKGPELLSKWVGESEKHVREMFRKARQVAPCVIFFDEIDSLAPRRGGIGDSHVTERVVSQLLTELDGLEELKDVVVIAATNRPDMIDPALLRPGRLERHIYIPPPDKKARVEIFKIHLRGKPLADDVNIEELAEKTEGYSGADIEAVCREAGMLAIRELIKPGMTREEAKEAAKKLKITKKHFEEALKKVRPSLTKEDVEKYEKLIEDFHRMYA

SEQ ID NO: 23194 - protein, 811 aa, Archaeoglobus fulgidus DSM 4304
MGDNMEITLKVNQAYPSDSGRGIARLDPDTMLKLQISPGDIIEIEGARKTVAKVWRAPKRDWGKNIIRIDRFIRENAGVGVGDVVKVRKVEYQPAKTVILAPLKKMDLRIYGVDIGEYLKHQFLKRPVVEGDLVPLVGSPALSGFGRYNQQNQAVVFVAVKTEPKGPVVIDETTKVVYRDRPAKGFERFGKAGITYEDIGGLKEELQKVREVIELPLRYPELFQRLGIEPPKGVLLYGPPGTGKTLIAKAVANEIGASFFTINGPEIMSKFYGESEQRLREIFEEAKENAPSIIFIDEIDSIAPKREEVTGEVERRVVAQLLTLMDGLEERGQVIVIGATNRIDAVDPALRRPGRFDREIEIGVPDREGRYEIFQIHTRNMPLEAKYSREFVLDAIERFKRQVDDPELIKNLDFLYDEIKNSETEEEVKGAVKNLLPQEVIDELEVEITKAMLRSLADQTHGFVGADIEALCKEAAMKALRRYLPQIDLNEDEIPIELLESIRVTWDDFMDALREIEPSAMREVFVEIPKVTWNDVGGLEDVKREIIEAVEWPLKYPEKFKKFGIKPPKGVLLYGPPGTGKTLIAKAVANESEANFISIKGGQILSKWLGESEKAVRKIFRKARQVAPCIIFFDEIDAIAQMRGIDEGSRAVERVLNQLLTEMDGLEELHGVVVIGATNRPDILDPALLRPGRFDRMVYVRPPDKKSRLAIFKIHTRDMPLSEDVDLEELADLTEGYVGADIEAICREAVMLAIRENINAEKVEMRHFLEALKKIKPSVNEAMLNFYERFEEKMRTERMQVAATKPFMGYG

SEQ ID NO: 23195 - protein, 773 aa, Sulfolobus acidocaldarius
MEIELSAGAEVSPSGKKELVLRVVEAKQKDVGRGKVRIDIDLLSQIGVNPGEVVELEGQRKTAAIAWPLAPEDVLNDEDKYIIRMDGITRKNAGVSIGDKVIVRKSNPKVATSVRLAPSNFSITVDPGFISYVKKKLKDTPLVEGDTVLIPVLGQAIPFTVVQVRPQGIVIVSDETSITISEKPVEQTRYPRVTYEDIGGMKEIIQKIRELVELPLRHPELFKRLGIEPPKGILLYGPPGVGKTLLAKAVANETDAYFTSINGPEIMSKFYGESEQRLREIFEDAKKHAPAIIFIDEIDAIAPKRDEVIGEVERRVVAQLLTLMDGLENRGNVIVIAATNRPNAVDPALRRPGRFDREIEIPLPDKQGRLEILQIHTRNMPLSKDVDLHKLAEMTHGYTGADLSALVREAAMNALRRYIQMIDLSQDKIPPEILEKMEVRMDDFLKAFKDIVPSGLREIYIEVPEVHWFDIGGLEEVKEELREVVEYPLKYREVYENMSIEPPKGILLFGPPGTGKTMLAKAVATESGANFIAVRGPEILSKWVGESEKAIREIFRKARQAAPTVIFFDEIDSIAPIRGLSTDSGVTERIVNQLLAEMDGIEKLENVVVIAATNRPDILDPALLRPGRFDRLIYVPPPDKTARFEILKVHTKNVPLAEDVSLEDIAEKAEGYTGADLAAVVREAALRAIREQMAECMGEANNECKKSDIECREKKIRDCMAGKGRIVERKHFDVALKKVRPSVTQDMIQFYQNWLEKARQQLPRTNIKPSTFT

SEQ ID NO: 23196 - protein, 780 aa, Sulfolobus acidocaldarius
MRINILRVEYHSKTAHSILLQLDLFKKVKVICHMSQSIKFRVTEARQRDVGKKVARISETSMRKLNVEAGDYIEIIGQDGNSALAQVMPAYDISDDEIRIDGYIRKSIKVGIGDDVTVRKTNVSPASKVVLAPTQPIRFDNSFVEYVKDTLMDKPLAKGETLPIPIYTGTLELTVVNTQPSNYVYVTGSTNIEIREEPVKESSLAYPKVSWEDIGDLEEAKQKIREIVEWPMRHPELFQRLGIDPPKGILLYGPPGTGKTLLARALRNEIGAYFITVNGPEIMSKFYGESEQRIREIFKEAEENAPSIIFIDEIDAIAPKREDVTGEVEKRVVAQLLTLMDGIKGRGRVIVIGATNRPDAIDPALRRPGRFDREIEIRPPDTKGRKDILQVHTRNMPITDDVDLDKLAEMTYGYTGADLAALAKEAAIYALRRFVDEKKLNLDQPTIPAEIIKELKVSMNDFLNALKSIQPSLLREVYVEVPKVNWNDIGGLDNVKQQLREAVEWPLRFPELFTKSGVTPPKGILLFGPPGTGKTMLAKAVATESGANFIAVRGPEILSKWVGESEKAIREIFRKARQAAPTVIFFDEIDSIAPIRGLSTDSGVTERIVNQLLAEMDGIVPLNKVVIIAATNRPDILDPALLRPGRFDRLIYVPPPDKTARFEILKVHTKNVPLAEDVSLEDIAEKAEGYTGADLEALVREATINAMRSIYSMCDKQSRDECKGNMECYQKHIKECMNKTSFKVSKEDFEKALNVVKASLTQADIQRYERFSKELKRAIA

SEQ ID NO: 23197 - protein, 591 aa, Sulfolobus acidocaldarius
MVVSNNTNTTAIPTLLSDYSSYIILAIQVLLFIIPILFFVYYMRRMGIGVGNRKKELEAKMRNIPSVSWEQIYDMKELKQKLLDISNYVMSRKRAYGVILFGPPGTGKTSIAKALANNLKWNYFELRSSDILSKWYGESEFLLENFFNTVELNVPAIIVIDEIDGFTLRREGDIHEVTHRLVNILLNRLQDIHDKRLPVIIIGTTNLPQEIDEALLRPGRFDEIIYVPLPDEKAREEIWLGYTKGLSVDCKLLANKSNRLSPADIKEIVESVSIECSKEGREPTTQDFIRYLDNFKPSVSIQTLIKFENLSKKYSRHKLGEKPYGIANIKWDDLGDLDEIKKVIRESVELPMKNKDIANKLGIKPVKGILLYGPPGTGKTSIAKALANELQASFIVVSGDEISSVGPFKAGELIAEKFHIAKDNSPSIIFIDEIDMIARTRGENEWRGALTELLSEMDGIRENEDVIIIGATNRPWDLDPALLRAGRFDRIIYVPPPDYEGRVKVLKVLTKGLSVDEEILNKVSRMTNNYTPADLKLVVDEIRRNLLKEATSTGNIRTSLNFDDFVRVLAYIKPSVNVELLKMYEQFRVER

SEQ ID NO: 23198 - protein, 769 aa, Sulfolobus solfataricus
MSASSGEEQKPQRKELILRVMEARQKDVGRGKVRIDIDLLSQIDVSPGDVVEIEGTRKTAALAWPLSPEDTTTGEKDIIRMDGITRKNAGVSIGDKVIVRKAIVKPASTVKLAPSNFSITVDPGFISYVKKRLKEFPLVEGDTVLIPVLGQAIPFTVVQVKPAGIVLVNDDTIISISDKPVEPSRYPRVTYEDIGGMKNIIEKVRELVELPLRHPELFKRLGIEPPKGILLYGPPGVGKTLLAKAIANETDAYFTSINGPEIMSKFYGESEQRLREIFEDAKKHAPAIIFVDEIDAIAPKRDEVIGEVERRVVAQLLTLMDGLENRGNVIVIAATNRPSAVDPALRRPGRFDREIEIPLPDKQGRLEILQIHTRNMPLSKDVDLEKLADMTHGYTGADLSALVREAAMNSLRRYLPKIDLNQDKIPPEILESMEVKMEDFINAFKEIVPSGLREIYIEVPEVKWTDIGGLEEIKEELKEVVEYPLKYSELYQNSGIEPPKGILLFGPPGTGKTMLAKAVATESGANFIAVRGPEILSKWVGESEKAVREIFRKARMYAPAVIFFDEIDSIAPIRGISYDSGVTERIVNQLLAEMDGIEKLENVVVIAATNRPDILDPALLRPGRFEKLIYVPPPDKRARTEILKVHTRNIALGEDISLEDVAEKTEGYTGADLAALVREATMRAIRESMKICIDKTNENCKPTDAECRDKTMKECMKVNGVKVSLRHFEEAMRKVKPSVTQDMLQFYQNWVEKARQQLPKTTVKPSTYA

SEQ ID NO: 23199 - protein, 769 aa, Sulfolobus solfataricus
MSTSQSRIVLMSKTYFKRFGKMNNMSQQLKLRVVEARQRDVGRKVARITDYTISRLGIENGDYVEIIGPSGSALAQALIGDGIADNEIRVDGYIRRSIGVGIGDEVTVKRAQVQDATKVVLAPTQPISFSQSFVEYVKDWLMDKPISRGETISVPTYVGSIDFVVVSTQPSQSVRITGRTSLEIRQEPVKESAAVPKVTWEDIGDLEDVKEKIREIVELPMRHPEVFQHLGIEPPKGVLLYGPPGVGKTLLARALANEIGAYFTSINGPEIMSKFYGESEQRLREIFEEAEKNSPAIIFIDEIDAIAPKREEVTGEVEKRVVAQLLTLMDGIKGRGKVIVIGATNRPDAVDPALRRPGRFDREIEIRPPDAKARKEILQVHTRNMPLAEDVDLDKISEQTHGYTGADLAALAREAAMNALRRFINERKINLEQEQIPVDVLKELKVTMQDFIDAMKFIQPTLLREVYVEVPKVKWEDIGGLEEAKQQLREAVEWPLKFPEMFEKLGIRPPKGILLFGPPGTGKTMLAKAVATESGANFIAVRGPEILSKWVGESEKAVREIFRRARQTAPCVIFFDEIDSIAPMRGFTHDSGVTERIVNQLLSEMDGIQSLNRVVVIAATNRPDILDPALLRPGRFDRLIYVPPPDEKARIEILKIYTRTLPIDSSVNLEELAKKLEGYTGADIEALARETTMKVLRQKYYDCLNKAKKECKDQECTDKTIKSCMSNLEIKITMQDFLDTMKIVTPSLTKADIMRYENMVKEIKRSVIG

SEQ ID NO: 23200 - protein, 607 aa, Sulfolobus solfataricus
MIEPVLNLAIIFISLAVLVIILMKIFGKSTAKFAYSDKALQLQNKSQKKKVEIEDKKITWDDIGGYEDAKKEIREYIELPLKNKDVATKYGLKPPKGMLLFGPPGCGKTMMMRALANESKLNFLYVNISDIMSKWYGESEARLRELFNNARKNAPCILFFDEIDTIGVKRESHTGDSVTPRLLSLMLSEIDGLHSEDGVIVVGSTNVPQMLDKALLRAGRFDKLIYIGPPNKEARKQILQIHCRGKPLAEDVDFDKLAEITERYSGADLANLCQEAARKVASEAIEKGADRKITMADFIELIKKYKPSITLQMIEDYEKFRLDFERRVRKGEEENELEEKLTLNDIGGYNEIKTELKELLELQLYHYKLLEQLRVPPIRGILLYGPPGVGKTMMAKALAKTLNVKLIALSGAEIMYKGYEGAIAAIKEVFNRARENKPAIILLDELDAIASKRSYKSYGDSSKIVNQLLTEMDGIRSLKEVVVIGTTNRLKAIDPALLRPGRFDKIIHMPLPNREERLDILMKYIGKEECEKVDCGILADQTEGYSGADLAALAREAKMKVLKSILRGESNRTLTREDLIDALNKIHPSVKKRLSKGSSSNSDHETR

SEQ ID NO: 23201 - protein, 585 aa, Sulfolobus solfataricus
MATVTSNNSTIGLGLSSNTLQLIIEVILTILFFLVPLIFWIYFSRRMMIGNTTKSRKPKIHIPNIRWDEVYDLKDVKMRLEEIAKIVQEGRAYGVILFGPPGTGKTTIAKALANKLGWAYFELRPSKILSKWYGESELLLDSFFDQVEINTPAVVFIDELDSLAMSRQSDLHEVTHRLVNIMLMRLQDLHDKNLRVIIIGATNVPQEIDEAFLRPGRFDEVIYVALPDEKSREEIWKGYIKREDIDYSLLAKKSERFSPADIKNVADKVISKNNSLKTEDFLREIENYKPSIQLSTIIKFENIARKYERSKLIIKTYGIPNISWNDLGDLEEVKRIIRESIVLPITNKEFAEKLGIYPVKGILLYGPPGTGKTSIAKALANDLRFNFIELSGEEVSGAGPLDAPKIIAEKFYIALDNAPAIIFIDEIDMIARNRMTNEWRNALTELLRQMDGLREIHNVIVVGATNRPWDLDPAILRAGRFDKIIYVPPPDKDGREKILQVLIKDLIINRNIISKVAELTENYTPADLKLVVEEVKRNLLKEASISGNLRTEVKLEDFMDVLKRVKASLDRQTLIMYEKFGFERR

SEQ ID NO: 23202 - protein, 745 aa, Thermoplasma acidophilum
MESNNGIILRVAEANSTDPGMSRVRLDESSRRLLDAEIGDVVEIEKVRKTVGRVYRARPEDENKGIVRIDSVMRNNCGASIGDKVKVRKVRTEIAKKVTLAPIIRKDQRLKFGEGIEEYVQRALIRRPMLEQDNISVPGLTLAGQTGLLFKVVKTLPSKVPVEIGEETKIEIREEPASEVLEEVSRISYEDIGGLSEQLGKIREMIELPLKHPELFERLGITPPKGVILYGPPGTGKTLIARAVANESGANFLSINGPEIMSKYYGQSEQKLREIFSKAEETAPSIIFIDEIDSIAPKREEVQGEVERRVVAQLLTLMDGMKERGHVIVIGATNRIDAIDPALRRPGRFDREIEIGVPDRNGRKEILMIHTRNMPLGMSEEEKNKFLEEMADYTYGFVGADLAALVRESAMNALRRYLPEIDLDKPIPTEILEKMVVTEDDFKNALKSIEPSSLREVMVEVPNVHWDDIGGLEDVKREIKETVELPLLKPDVFKRLGIRPSKGFLLYGPPGVGKTLLAKAVATESNANFISIKGPEVLSKWVGESEKAIREIFKKAKQVAPAIVFLDEIDSIAPRRGTTSDSGVTERIVNQLLTSLDGIEVMNGVVVIGATNRPDIMDPALLRAGRFDKLIYIPPPDKEARLSILKVHTKNMPLAPDVDLNDIAQRTEGYVGADLENLCREAGMNAYRENPDATSVSQKNFLDALKTIRPSVDEEVIKFYRTLSETMSKSVSERRKQLQDQGLYL

SEQ ID NO: 23203 - protein, 375 aa, Thermoplasma acidophilum
MRVLDDIDEKIDKATKLLQGGIKEESLGHKDKAKEYYFAAYRLMLEAANASPPDLKKKRLDQCNIILSAYQRVNENRTAPAEEKTSDRISEGEALLEEIGLEKPEIPKVTFEDVAGLDDVKNEILGKIVYPMKFKELSQEYNIQFGGGMLLYGPPGTGKTFIVKAIANEVRARFINVNPASLYSQWFGMFEKNISKLFRAAALLSPSIIFFDEIDALVPKRDTSNSDAAKRGVAQLLNEVGGINSQKNKNLFIIAATNNPWEIDEAMLRPGRFDIKIYVPPPDIIARKKIFELNMAKVKQAGNIDYNLLAQQTEGYSGADIEFICKKASQNVFMEAVKSGKQRQVETRDLLDVIGSIKPSIDADLLSKYREFAGF

SEQ ID NO: 23204 - protein, 795 aa, Pyrococcus abyssi
MAEKKEVKLKVASAYQRDVGRGIVRLDRKTMRELGISPGDVVEIIGTKNTAAIAWPAYPEDEGLGIIRMDGTIRKNAGVGLGDEVTVRKAEVREAKKVTLAPTEPIRFGRDFVEWLHERLVGRPVVRGDYIKVGVLGQELTFVVTATQPSGVVQITEFTDFNISEKPVKEVEKRMTTGVTYEDIGGLKDVIEKIREMIELPLKHPELFEKLGIEPPKGVLLYGPPGTGKTLLAKAVANEANAYFIAINGPEIMSKYYGESEERLREVFKEAEENAPAIIFIDEIDAIAPKRSEVTGEVEKRVVAQLLALMDGLKSRGKVIVIGATNRPDAIDPALRRPGRFDREIEVGVPDRQGRKEILQIHTRGMPIEPDFRKDDVLKILEDFKREGKFTKIIDKAIEEVNKSKEEEIPQVLKKIDAELYDEVKTRLIDKLLDELADVTHGFVGADLAALAREAAMAALRRLIREGKIDFEAETIPREVLDELKVTRRDFYEALKMVEPSALREVLIEVPNVHWDDIGGLEDVKQELREAVEWPLKYPEAFKAYGITPPKGILLYGPPGTGKTLLAKAVATESQANFIAVRGPEILSKWVGESEKNIREIFRKARQAAPTVIFIDEIDAIAPRRGTDVNRVTDRIINQLLTEMDGIQENAGVVVIAATNRPDILDPALLRPGRFDRLILVPAPDEKARFEIFKVHTRGMPLADDVDLKELARRTEGYTGADIAAVCREAAMIAMRRALEKGIIKPGMKASEIRRLAKVTMKDFEEALRKIGPSVSKETMEYYRKIQEQFKQARG

SEQ ID NO: 23205 - protein, 840 aa, Pyrococcus abyssi
MILGRSEPQKDEIKLRVAEALKRDVGRGIVRFDRKYQRMIGVEPGDIVEIEGERITAAIVANPHPDDRGLDIIRMDGYIRKNAGVTIGDFVTIRRAEVKEAKKVVLAPAQKGVIVQIPGDIVKNNLLGRPVVKGDIIVASGRSEMYYSSGTPFDEIFRGFFEAMSVGFGELKFMVVNTIPKGIVQITYNTEVEVLPQAVEVREEKIPEVTYEDIGGLKEAIEKIREMVELPLKHPELFERLGIEPPKGVLLYGPPGTGKTLLAKAVANEANAYFIAINGPEIMSKYYGESEERLREIFKEAEENAPAIIFIDEIDAIAPKREEVVGEVEKRVVSQLLTLMDGLKSRGKVIVIAATNRPDALDPALRRPGRFDREIEVGVPDKQGRKEILQIHTRGMPIEPDFEKETVIKALKELEKDDRFDKEKIKKIIEKVSKAKSEEEIKDILREDRNLYIEVRTKLIDKLLDELAEVTHGFVGADLAALAREAAMVVLRRLIKEGKINPEAETIPREVLEELKVTKADFYEALKMVEPSALREVLIEVPNVHWDDIGGLEDVKQELREAVEWPLKYPKAFKRLGITPPKGVLLYGPPGTGKTLLAKAVATESQANFIAIRGPEVLSKWVGESEKRIREIFRKARQASPAIIFIDEIDAIAPARGTAEGEKVTDRIINQLLTEMDGLVENSGVVVIAATNRPDILDPALLRPGRFDRLILVPAPDEKARFEIFKVHTRGMPLADDVDLKELARRTEGYTGADIAAVCREAAMNALRRAVAKLSPEELEEESEKFLKSLIVTRKDFEVALKKVKPSVTKYMMEYYRQFEESRKRMVGESTGREPDYFTG

SEQ ID NO: 23206 - protein, 558 aa, Chlamydomonas reinhardtii
MGGADVQAITIAVTTGRDCAMSGDYSAGCTYYENAVELITRYVRTLGDPHAIRQWSALLKEVQDEHSSVRQCDKEARGMRVYDSVARSNSYPEMNDPRGSAAYDDGYRQPIVVCHNSGQEDPMVWRPPTRGEGRSGAPARGAPPPRARSSQDDNKLPSWANNNNGGGGGPPARGNAAGPSGRAGSAPRRPTGNAPAGNAAAGGSYDRPWRQNMQGKQGAAGPGGKPGDKGSAGEKAKKQYSGPDQELAAMLERDIVDQGTSVKWDDIAGLEEAKRVLNEALVLPMIMPDFFTGIRRPVKGVLLFGPPGTGKTMLAKAAATETSCTFFNVSSATLASKYRGESERMVRILFEMARDLAPSMIFIDEVDSLCSQRGTANEHEASRRVKTELLTQVDGVHGSEKDKEPGPDGEPPAPKHVFVLAATNFPWDIDEALRRRLEKRVYIPLPGQAQRLQLLKINLRDVAVAPDVNLEAVAGQMDGYSGDDITNVCRDAAMNGMRRLVAGKTPAEIKALREAGMTGGQEPITSDDFREALRKINPSVSKEDIKRHEEWLSVFGST

SEQ ID NO: 23207 - protein, 433 aa, Pinus taeda
MRVEELGGILKPASDLEAAANAKEKLKEKHQLPKESNRMVKHGEGLRQYYLQHIHDLQLQVRQKTHNLNRLEAQRNDLNSKVRALREELQLLQEPGSYVGEVVKVMGKSKVLVKVHPEGKYVVDVDKNIDITKITPSTRVALRNDSYVLHLILPSKVDPLVNLMKVEKVPDSTYDMIGGLDQQIKEIKEVIELPIKHPELFESLGIAQPKGVLLYGPPGTGKTLLARAVAHHTDCTFIRVSGSELVQKYIGEGSRMVRELFVMAREHAPSIIFMDEIDSIGSARMESGTGNGDSEVQRTMLELLNQLDGFEASNKIKVLMATNRIDILDQALLRPGRIDRKIEFPNPNEESRFDILKIHSRKMNLMRGIDLKKIAEKMSGASGAELKAVCTEAGMFALRERRVHVTQEDFEMAVAKVMKKETEKNMSLRKLWK

SEQ ID NO: 23208 - protein, 215 aa, Mirabilis jalapa
GSSVGDAGGAADRVLNQLLTEMDGMSAKKTVFIIGATNRPDIIDPALLRPGRLDQLIYIPLPDEDSRHQIFKAALRKSPIAKDVDIRALAKYTQGFSGADITEICQRACKYAIRENIEKDIEREKRRSENPEAMEEDVEDEVAEIKAAHFEESMKFARRSVSDADIRKYQAFAQTLQQSRGFGTEFRFANTTADTTSTDAFAAADAGADDDDLYN

SEQ ID NO: 23209 - protein, 1219 aa, Plasmodium falciparum 3D7
MNINFYVYDDEADNEIISSNFNVYCSDEFLKIHNIEKNDNAIIYHEIMRQDEEEGQEKGQEIGQEKDQEKDQKKDQNKDQKKDQNKDQKKEQARNINHINNIHININKIDDEYVEKEPKPNVQNFSVLCCFKNYNELNIKKKLENNGLCINKYILKSLNLDIKEIEEKNIYKSCKDQNNNMKKIGIFKVSIIKPQLFIPIKEIKLHVQEIFNTSYEYLKSYQYENIDLLQSFWKNIKSNNMEKYINLSLLNTCLFVNNFLKITILGVHSYITVGQIILTKDKKTKMKNNNNNNKNKTVRNMNARDKQENNKNGDNKNKNGDNNNKNGDNKNKNGDNKNKNGDNKNKNGDNKNKNGDNNNNIVVPFIDQNTKIVIISNDDIKNVVDDKHIINKYDKEKTNINSDHMKKLNLKKMVVNKKEKKGLNKLGGYNKIKEDIYYYILIPLIYKHIYDAYHIDIHKGILLHGPPGCGKTYIALLIKEELSLLKKKFCTITQNKTSKQLNNTKNDNNYNNDDNIIIPEIEILKSTDLIDYNNTGYKINELFLRCHKRYQEENKCTIIFIDEIEILCKKREENNNMNIYTSVLLNNMDGIKKHTHTILIGATNYINKIDLALRRSGRFDKEIEVNLPNLKDRISIFQKKLNLIKHNIGKKKIHKLADLCQSFTCSDINSLINISMFLNLKENKIISRDIFKTANVHTIDDTNDIKNDQTSACLEDCIEGKIGTNEMHNTKENKYINMNNNNDNDNNNDNNNDNNNDNNNGDNNNYYLTPYDKNHLYNNSLINTQSNSCHEKKMMNYNKNNLYLLRYKHLLKALKYVKPSGMKELYIDIPKTRFKDIGGYKFVKRCINECLIYPKKYKNIYDKYNIESPKGILLYGPPGCSKTLFAKAIASEIHMNFISVKGPEIFSKYVGESEKSIRNIFKKARENHPCVIFFDEIDSIAVNRNNNQNFVSNRVLCQLLNEIDGIKNRLNVIILAATNRPDLIDPALMRPGRFDRIIYVPLPNYSSRFAILKKNLKFFKIHNLIEYDKKETINDLNHNEIKRECIIQDIQYNDHPKNSNQKINNHITKSSYDHIHNYTFNKNNMNIKTNEDSSLYKHYKYTDIKFIKLCHVLAKKTKKYSGAEIVNICREASICALRQTLKKRNIKINPKIKIKIKNNETNNTQNNIAHSEKNKYPFDKEPLIGLSKKHFLRVLKKIKPQTSESLINFYKNYKEQNKV

SEQ ID NO: 23210 - protein, 810 aa, Arabidopsis thaliana
MSNEPESSDSKTKKDFSTAILERKKSPNRLVVDEAINDDNSVVSLHPTTMEKLQLFRGDTILIKGKKRKDTVCIALADETCEEPKIRMNKVVRSNLRVRLGDVISVHQCPDVKYGKRVHILPVDDTVEGVTGNLFDAYLKPYFLEAYRPVRKGDLFLVRGGMRSVEFKVIETDPAEYCVVAPDTEIFCEGEPVKREDEERLDEVGYDDVGGVRKQMAQIRELVELPLRHPQLFKSIGVKPPKGILLYGPPGSGKTLIARAVANETGAFFFCINGPEIMSKLAGESESNLRKAFEEAEKNAPSIIFIDEIDSIAPKREKTNGEVERRIVSQLLTLMDGLKSRAHVIVMGATNRPNSIDPALRRFGRFDREIDIGVPDEIGRLEVLRIHTKNMKLAEDVDLERISKDTHGYVGADLAALCTEAALQCIREKMDVIDLEDDSIDAEILNSMAVSNEHFHTALGNSNPSALRETVVEVPNVSWEDIGGLENVKRELQETVQYPVEHPEKFEKFGMSPSKGVLFYGPPGCGKTLLAKAIANECQANFISVKGPELLTMWFGESEANVREIFDKARQSAPCVLFFDELDSIATQRGNSAGDAGGAADRVLNQLLTEMDGMNAKKTVFIIGATNRPDIIDSALLRPGRLDQLIYIPLPDEDSRLNIFKACLRKSPVAKDVDVTALAKYTQGFSGADITEICQRACKYAIRENIEKDIENERRRSQNPEAMEEDMVDDEVSEIRAAHFEESMKYARRSVSDADIRKYQAFAQTLQQSRGFGSEFRFDSTAGVGRTTGVAAADPFATSAAAADDDDLYS

SEQ ID NO: 23211 - protein, 843 aa, Arabidopsis thaliana
MGNHRAYKIPSSAPLRSHSSSSSSSPIDLSRNKFPNFLLRALLKTKKDFSTAILERKKSPNRLVVDEAINDDNSVVSLHPTTMEKLQLFRGDTILIKGKKRKDTVCIALADETCEEPKIRMNKVVRSNLRVRLGDVISVHQCPDVKYGKRVHILPVDDTVEGVTGNLFDAYLKPYFLEAYRPVRKGDLFLVRGGMRSVEFKVIETDPAEYCVVAPDTEIFCEGEPVKREDEERLDEVGYDDVGGVRKQMAQIRELVELPLRHPQLFKSIGVKPPKGILLYGPPGSGKTLIARAVANETGAFFFCINGPEIMSKLAGESESNLRKAFEEAEKNAPSIIFIDEIDSIAPKREKTNGEVERRIVSQLLTLMDGLKSRAHVIVMGATNRPNSIDPALRRFGRFDREIDIGVPDEIGRLEVLRIHTKNMKLAEDVDLERISKDTHGYVGADLAALCTEAALQCIREKMDVIDLEDDSIDAEILNSMAVSNEHFHTALGNSNPSALRETVVEVPNVSWEDIGGLENVKRELQETVQYPVEHPEKFEKFGMSPSKGVLFYGPPGCGKTLLAKAIANECQANFISVKGPELLTMWFGESEANVREIFDKARQSAPCVLFFDELDSIATQRGNSAGDAGGAADRVLNQLLTEMDGMNAKKTVFIIGATNRPDIIDSALLRPGRLDQLIYIPLPDEDSRLNIFKACLRKSPVAKDVDVTALAKYTQGFSGADITEICQRACKYAIRENIEKDIENERRRSQNPEAMEEDMVDDEVSEIRAAHFEESMKYARRSVSDADIRKYQAFAQTLQQSRGFGSEFRFDSTAGVGRTTGVAAADPFATSAAAADDDDLYS

SEQ ID NO: 23212 - protein, 809 aa, Arabidopsis thaliana
MSTPAESSDSKSKKDFSTAILERKKSPNRLVVDEAINDDNSVVSLHPATMEKLQLFRGDTILIKGKKRKDTVCIALADETCEEPKIRMNKVVRSNLRVRLGDVISVHQCPDVKYGKRVHILPVDDTVEGVTGNLFDAYLKPYFLEAYRPVRKGDLFLVRGGMRSVEFKVIETDPAEYCVVAPDTEIFCEGEPVKREDEERLDDVGYDDVGGVRKQMAQIRELVELPLRHPQLFKSIGVKPPKGILLYGPPGSGKTLIARAVANETGAFFFCINGPEIMSKLAGESESNLRKAFEEAEKNAPSIIFIDEIDSIAPKREKTNGEVERRIVSQLLTLMDGLKSRAHVIVMGATNRPNSIDPALRRFGRFDREIDIGVPDEIGRLEVLRIHTKNMKLAEDVDLERISKDTHGYVGADLAALCTEAALQCIREKMDVIDLEDDSIDAEILNSMAVTNEHFHTALGNSNPSALRETVVEVPNVSWNDIGGLENVKRELQETVQYPVEHPEKFEKFGMSPSKGVLFYGPPGCGKTLLAKAIANECQANFISVKGPELLTMWFGESEANVREIFDKARQSAPCVLFFDELDSIATQRGGGSGGDGGGAADRVLNQLLTEMDGMNAKKTVFIIGATNRPDIIDSALLRPGRLDQLIYIPLPDEDSRLNIFKAALRKSPIAKDVDIGALAKYTQGFSGADITEICQRACKYAIRENIEKDIEKEKRRSENPEAMEEDGVDEVSEIKAAHFEESMKYARRSVSDADIRKYQAFAQTLQQSRGFGSEFRFENSAGSGATTGVADPFATSAAAAGDDDDLYN

SEQ ID NO: 23213 - protein, 815 aa, Arabidopsis thaliana
MANQAESSDSKGTKKDFSTAILEKKKAANRLVVDEAINDDNSVVSLHPDTMEKLQLFRGDTILIKGKKRKDTVCIALADETCDEPKIRMNKVVRSNLRVRLGDVISVHQCPDVKYGNRVHILPLDDTIEGVSGNIFDAYLKPYFLEAYRPVRKGDLFLVRGGMRSIEFKVIETDPAEYCVVAPDTEIFCEGEPIKREDEERLDEVGYDDVGGVRKQMAQIRELVELPLRHPQLFKSIGVKPPKGILLYGPPGSGKTLIARAVANETGAFFFCINGPEIMSKLAGESESNLRKAFEEAEKNAPSIIFIDEIDSIAPKREKTHGEVERRIVSQLLTLMDGLKSRAHVIVMGATNRPNSIDPALRRFGRFDREIDIGVPDEIGRLEVLRIHTKNMKLAEDVDLERVSKDTHGYVGADLAALCTEAALQCIREKMDVIDLDDEEIDAEILNSMAVSNDHFQTALGNSNPSALRETVVEVPNVSWEDIGGLENVKRELQETVQYPVEHPEKFEKFGMSPSKGVLFYGPPGCGKTLLAKAIANECQANFISIKGPELLTMWFGESEANVREIFDKARQSAPCVLFFDELDSIATQRGNSVGDAGGAADRVLNQLLTEMDGMNAKKTVFIIGATNRPDIIDPALLRPGRLDQLIYIPLPDEESRYQIFKSCLRKSPVAKDVDLRALAKYTQGFSGADITEICQRSCKYAIRENIEKDIEKERKRAESPEAMEEDEEEIAEIKAGHFEESMKYARRSVSDADIRKYQAFAQTLQQSRGFGSEFRFPDAPTGTTGAFPGAAATVGGVDPFATSGGAADDDDLYS

SEQ ID NO: 23214 - protein, 807 aa, Glycine max
MSQQGESSDPKSGKKDFSTAILERKKSPNRLVVDEAVNDDNSVVTMHPQTMEKLQLFRGDTILIKGKKRKDTICIALADENCEEPKIRMNKVVRSNLRVRLGDVVSVHQCPDVKYGKRVHILPIDDTIEGVTGNLFDAFLKPYFLEAYRPVRKGDLFLVRGGMRSVEFKVVETDPGEYCVVAPDTEIFCEGEPLKREDEERLDEVGYDDVGGVRKQMAQIRELVELPLRHPQLFKSIGVKPPKGILLYGPPGSGKTLIARAVANETGAFFFCINGPEIMSKLAGESESNLRKAFEEAEKNAPSIIFIDEIDSIAPKREKTHGEVERRIVSQLLTLMDGLKSRAHVIVIGATNRPNSIDPALRRFGRFDREIDIGVPDEVGRLEVLRIHTKNMKLSDDVDLERIAKDTHGYVGADLAALCTEAALQCIREKMDVIDLEDETIDAEVLNSMAVTNEHFQTALGTSNPSALRETVVEVPNVSWEDIGGLENVKRELQETVQYPVEHPEKFEKFGMSPSKGVLFYGPPGCGKTLLAKAIANECQANFISVKGPELLTMWFGESEANVREIFDKARQSAPCVLFFDELDSIATQRGSSVGDAGGAADRVLNQLLTEMDGMSAKKTVFIIGATNRPDIIDPALLRPGRLDQLIYIPLPDEDSRHQIFKACLRKSPIAKNVDLRALARHTQGFSGADITEICQRACKYAIRENIEKDIERERKSRENPEAMDEDTVDDEVAEIKAAHFEESMKFARRSVSDADIRKYQAFAQTLQQSRGFGSEFRFPESGDRTTTGSDPFAASAGGADEDDLYS

SEQ ID NO: 23215 - protein, 807 aa, Glycine max; identical to SEQ ID NO: 23214

SEQ ID NO: 23216 - protein, 808 aa, Glycine max
  unsure (1)..(808): unsure at all Xaa locations
MSQQGESSDPKSGKKDFSTAILERKKSPNRLVVDEAVNDDNSVVTMHPQTMEKLQLFRGDTILIKGKKRKDTICIALADENCEEPKIRMNKVVRSNLRVRLGDVVSVHQCPDVKYGKRVHILPIDDTIEGVTGNLFDAFLKPYFLEAYRPVRKGDLFLVRGGMRSVEFKVIETDPGEYCVVAPDTEIFCEGEPLKREDEERLDEVGYDDVGXGVRKQMAQIRELVELPLRHPQLFKSIGVKPPKGILLYGPPGSGKTLIARAVATETGAFFFCINGPEIMSKLAGESESNLRKAFEEAEKNAPSIIFIDEIDSIAPKREKTHGEVERRIVSQLLTLMDGLKSRAHVIVIGATNRPNSIDPALRRFGRFDREIDIGVPDEVGRLEVLRIHTKNMKLSDDVDLERIAKDTHGYVGADLAALCTEAALQCIREKMDVIDLEDETIDAEVLNSMAVTNEHFQTALGTSNPSALRETVVEVPNVSWEDIGGLENVKRELQETVQYPVEHPEKFEKFGMSPSKGVLFYGPPGCGKTLLAKAIANECQANFISVKGPELLTMWFGESEANVREIFDKARQSAPCVLFFDELDSIATQRGSSVGDAGGAADRVLNQLLTEMDGMSAKKTVFIIGATNRPDIIDPALLRPGRLDQLIYIPLPDEDSRHQIFKACLRKSPIAKNVDLRALARHTQGFSGADITEICQRACKYAIRENIEKDIERERKSRENPEAMDEDTVDDEVAEIKAAHFEESMKFARRSVSDADIRKYQAFAQTLQQSRGFGSEFRFPESGDRTTTGSDPFAASAGGADEDDLYS

SEQ ID NO: 23217 - protein, 808 aa, Glycine max
  unsure (1)..(808): unsure at all Xaa locations
MSQQGESSDPKSGKKDFSTAILERKKSPNRLVVDEAVNDDNSVVTMHPQTMEKLQLFRGDTILIKGKKRKDTICIALADENCEEPKIRMNKVVRSNLRVRLGDVLSVHQIPYVSYGKRVHILPIDDPILYFTCKLFHALLKPDFWXAESVLFKVDLLFVMXGVSGTECLAYVSVAVDXNFFKVASTLVGEGEAVKREDEKNRVEIGYDAVGSVKKEMCQIRELIKLPLRHPQLFKSIGVKPPKGILLYGPPGSGKTLIARAVANETGAFFFCINGPEIMSKLAGESESNLRKAFEEAEKNAPSIIFIDEIDSIAPKREKTHGEVERRIVSQLLTLMDGLKSRAHVIVIGATNRPNSIDPALRRFGRFDREIDIGVPDEVGRLEVLRIHTKNMKLSDDVDLERIAKDTHGYVGADLAALCTEAALQCIREKMDVIDLEDETIDAEVLNSMAVTNEHFQTALGTSNPSALRETVVEVPNVSWEDIGGLENVKRELQETVQYPVEHPEKFEKFGMSPSKGVLFYGPPGCGKTLLAKAIANECQANFISVKGXPELLTANVREIFDKARQSAPSVLFFDELDSIATQRGSSVGDAGSTVDDAVNAADRVLNQLLTEMDGMSAKKTVFIIGATNRPDIIDPALLRPGRLDQLIYIPLPDEDSRHQIFKACLRKSPIAKNVDLRALARHTQGFSGADITEICQRACKYAIRENIEKDIERERKSRENPEAMDEDTVDDEVAEIKAAHFEESMKFARRSVSDADIRKYQAFAQTLQQSRGFGSEFRFPESGDRTTTGSDPFAASAGGADEDDLYS

SEQ ID NO: 23218 - protein, 856 aa, Glycine max
MSAEPDHSASKGKVKLDNDPSGAEKRDENEVATAILKKKKKPNSLIVTDATTDDNSILALSNNTMETLQLFRGDTVLVKGKKRKDTVLIVLADDDLDDGSVRMNRVVRHNLRVKLGDVVTVNPCPDIKYAKRIAVLPMADTIEGLTGSLFDVFLAPYFREAYRPLRQGDLFTARAAMRTVEFKVVEIDPPEYGIVAQDTVIHCEGEPIQREDEEGNLNEVGYDDIGGCRKQMAQVRELVELPLRHPQLFKSIGIKPPRGILMYGPPGTGKTLMARAVANETGAFFFLINGPEIMSKMAGESESNLRKAFEEAEKNSPAIIFIDEIDSIAPKREKTNGEVERRVVSQLLTLMDGMKARSNVVVMAATNRPNSIDPALRRFGRFDREVDIGIPDPTGRLEILQIHTKNMKLADEVDLETIAAETHGYVGSDIASLCSEAAMQQIREKMDLIDLDEDTIDAEVLDSLGVTQENFRFALGVSNPSALREVAVVEVPNVRWEDIGGLEDVKRELVESVQYPVDHPEKFLKFGLSPSRGVLFYGPPGTGKTLLAKAVANECAANFISVKGPELLSMWFGESESNIRDIFDKARAAAPCVVFLDELDSIAKSRGGSQGDAGGASDRVVNQLLTEMDGMTSKKNVFVIGATNRPEQLDNALCRPGRLDTLVYVPLPDQPGRESILKAQLRKTPVAKDVDLSYIASKTHGFSGADLGFITQRAVKLAIKESISLAIEKQKEREAAEGDDTKMDEDVDEEDPVPELTKRHFEEAMSMARRSVTDTEIRRYEAFAQSMKNSAGGSAFFRFPEGGLSTTSCGNRHGDGNWLAAADSSFASNAYDTDDADGSVSRCMNEAMRLTRSWPL

SEQ ID NO: 23219 - protein, 380 aa, Glycine max
  unsure (1)..(380): unsure at all Xaa locations
MASQPESSDAKGTKRDFSTAILERKKAPNRLVVDEAVNDDNSVVALHPDTMEKLQLFRGDTILIKGKKRKDTICIALADETCEEPKIRMNKVVRNNLRVRLGDVVSVHQCPDVKYGKRVHILPVDDTIEGVTGNLFDAYLKPYFLEAYRPVRKGDLFLVRGGMRSVEFKVIETDPSEYCVVAPDTEIFCEGEPVKREDENRLDEVGYDDVGGVRQQMAQIREXXELPLRHPQLFKSIGVKPPKGILLYGPPGSGKTLIARAVANETGAFFFCINGPEIMSKLAGESESNLRKAFEEAEKNAPSIIFIDEIDSIAPKREKTHGEVERRIVSQLLTLMDGLKSRAHVIVIGATNRPNSIDPALRRFGRFDREIDIGVPDEVG

SEQ ID NO: 23220 - protein, 346 aa, Glycine max
  unsure (1)..(346): unsure at all Xaa locations
XNPSALRETVVEVPNVSWEDIGGLENVKRELQETVQYPVEHPEKFEKFGMSPSKGVLFYGPPGCGKTLLAKAIANECQANFISVKGPELLTMWFGESEANVREIFDKARGSAPCVLFFDELDSIATQRGSSVGDAGGAADRVLNQLLTEMDGMSAKKTVFIIGATNRPDIIDPALLRPGRLDQLIYIPLPDEDSRHQIFKACLRKSPVSKDVDLRALAKYTQGFSGADITEICQRACKYAIRENIEKDIERERRKRDNPEAMEEDDVEDEIAEIKAAHFEESMKYARRSVSDADIRKYQAFAQTLQQSRGFGSEFRFADSTSAGGTAAASDPFASAGGADEDDLYS

SEQ ID NO: 23221 - protein, 355 aa, Glycine max
  unsure (1)..(355): unsure at all Xaa locations
VDEFFFFVIYFLIKCLCXQVVEVPNVSWEDIGGLENVKRELQETVQYPVEHPEKFEKFGMSPSKGVLFYGPPGCGKTLLAKAIANECQANFISVKGPELLTMWFGESEANVREIFDKARQSAPCVLFFDELDSIATQRGSSVGDAGGAADRVLNQLLTEMDGMSAKKTVFIIGATNRPDIIDPALLRPGRLDQLIYIPLPDEDSRHQIFKACLRKSPVAKNVDLRTLARHTQGFSGADITEICQRACKYAIRENIEKAIERERKSKENPEAMDEDTVDDEVAEIKAAHFEESMKFARRSVSDADIRKYQAFAQTLQQSRGFGSEFRFPESGDRTTTGSDPFATSAGGADEDDLYS

SEQ ID NO: 23222 - protein, 356 aa, Glycine max
  unsure (1)..(356): unsure at all Xaa locations
VDEFFFFVIYFLIKCLCXQVVEVPNVSWEDIGGLENVKRELQETVQYPVEHPEKFEKFGMSPSKGVLFYGPPGCGKTLLAKAIANECQANFISVKGPELLTMWFGESEANVREIFDKARQSAPCVLFFDELDSIATQRGSSVGDAGGAADRVLNQLLTEMDGMSAKKTVFIIGATNRPDIIDPALLRPGRLDQLIYIPLPDEDSRHQIFKACLRKSPVAXNVDLRTLARHTQXGFSGADITEICQRACKYAXRETIEKAIEHERKRRETPEAMDEDMEGENVSKIKAAHFEKSMKYARRSVSDADIRKYQAFAQTLQQSRGFGSDFNFPAAVSRTXXGFEPFATFAGGADENDLYS

SEQ ID NO: 23223 - protein, 346 aa, Glycine max
  unsure (1)..(346): unsure at all Xaa locations
XNPSALRGPVLLTPWVGGGEAGGREIVDRARRAAPRVPFVHPLKFEKFGMSPSKGVLFYGPPGCGKTLLAKAIANECQANFISVKGPELLTMWFPAREANVREIFDKARGSAPCVLFFDELDSIATQRGSSVGDAGGAADRVLNQLLTEMDGMSAKKTVFIIGATNRPDIIDPALLRPGRLDQLIYIPLPDEDSRHQIFKACLRKSPVSKDVDLRALAKYTQGFSGADITEICQRACKYAIRENIEKDIERERRKRDNPEAMEEDDVEDEIAEIKAAHFEESMKYARRSVSDADIRKYQAFAQTLQQSRGFGSEFRFADSTSAGGTAAASDPFSSAGGADEDDLYN

SEQ ID NO: 23224 - protein, 805 aa, Capsicum annuum
MTDQAESSDSKNAKKDFSTAILERKKAANRLVVDEAVNDDNSVVALHPATMEKLQLFRGDTILIKGKKRKDTVVIALADETCDEPKIRMNKVVRSNLRVRLGDVVSVHQCPDVKYGKRVHILPIDDTIEGLTGDLFDAFLKPYFLEAYRPLRKGDNFLVRGGMRSVEFKVIETDPGEYCVVAPDTEIFCEGEPVKREDEERLDEVGYDDVGGVRKQMAQIRELVELPLRHPQLFKSIGVKPPKGILLYGPPGSGKTLIARAVANETGAFFFCINGPEIMSKLAGESESNLRKAFEEAEKNAPSIIFIDEIDSIAPKREKTHGEVERRIVSQLLTLMDGLKSRAHVIVMGATNRPNSIDPALRRFGRFDREIDIGVPDEVGRLEVLGIHTKNMKLAEEVDLERISKDTHGYVGADLAALCTEAALQCIREKMDVLDLEDDTIDAEVLNSMAVTNEHFQTALGTSNPSALRETVVEVPNVSWEDIGGLENVKRELQETVQYPVEPPEKFEKFGMSPSKGVLFYGPPGCGKTLLAKAIANECQANFISVKGPELLTMWFGESEANVREIFDKARQSAPCVLFFDELDSIATQRGSSSGDAGGAADRVLNQLLTEMDGMNAKKTVFIIGATNRPDIIDPALLRPGRLDQLIYIPLPDEDSRHQIFKACLRKSPLSKDIDLRALAKHTQGFSGADVTEICQRACKYAIRENIEKDIEREKRRQENPDSMDEDVDEVPEIKPAHFEESMKYARRSVSDADIRKYQAFAQTLQQSRGFGTEFRFADTSGGATAAADPFATSNAAADDDDLYS

SEQ ID NO: 23225 - protein, 793 aa, Dictyostelium discoideum
MATIEDTSKDNNNPILERKKAPNRLFVEEAINDDNSVVTLNPETMDQLQFFRGDTLLIKGKKRRDTVCIVLSDPTIDPSKIRMNKVVRNNLRVRLGDMISVHQCSDVKYGKRIHVLPIDDTIEGLSGNLFDLYLKPYFLEAYRPVRKGDLFLVRGGMRAVEFKVVETDPGEYCIVAPETFIHCEGEAVKREDEDRLDEVGYDDIGGVRKQLGQIRELVELPLRHPQLFKNIGVKPPKGILLYGPPGCGKTMIARAVANETGAFFFLINGPEIMSKLAGESESNLRKAFEEAEKNAPSIIFIDEIDSIAPKREKTQGEVERRIVSQLLTLMDGLKSRAHVIVMGATNRPNSIDPALRRFGRFDREIDITIPDATGRLEIMRIHTKNMKLDETVDLEAVANETHGYVGADLAALCTESALQCIREKMDVIDLEDETISAEILESMSVTQDHFRTALTLSNPSALRETVVEVPTTTWEDIGGLEGVKRELRETVQYPVEHPEKFRKFGMQPSKGVLFYGPPGCGKTLLAKAIANECQANFISIKGPELLTMWFGESEANVRELFDKARQAAPCVLFFDELDSIARSRGSSQGDAGGAGDRVINQILTEMDGMNAKKNVFIIGATNRPDIIDPAILRPGRLDQLIYIPLPDLPSRVAILKACLNKSPVAKDVDLEFLGQKTQGFSGADLTEICQRACKLAIRESIEKDIESTKARQESGDTKMEDDSVDPVPEITRDHFQEAMRSARRSVSDNDIRKYESFAQTLVQSRGLGNNFKFPDQESSGQFNQDQSDDLFSN

SEQ ID NO: 23226 - protein, 738 aa, Dictyostelium discoideum
MTVKPEFIFNENVQYNQIKCNTKTIESLKLSSYQYIKLFISDKHCLIVEVIPDVTIEDNTILLSNQIINKIGNKNQINRYSFNFEPIEIISNNNNNKNKNNVTITIKNINSPYNGKILNNSIKRFFSYKPIIKDCEYLCPMVGNMCIFRVVDIKRNNNNSNNNNNNYGDNDSSFEHIQEFLENNNNINEIIIMDDNTPENKELNIELIDIKEQVEQLSEFLKLKFNTSFSNNNNKYSNQLNFLKSKGILIDGPEGTSKLQLIEYIAQQYNYKYLNLNELVNGGSGGGGGEQLNSKEPMIYILNNLDSIVGKISDNENSYQKKVIQRLTNFIDHIKSNEIILSTCTSVENIDQSITRAGRIDKFIHLTIPTQSKRMLILSNLLKNTPLQYDTNNNNDDIDQCKIKDKEQFIVELSKITPGFLFKDLTKLCRTVSLLTVSSFEEEEEEENENEKEIKISFKIFKEALKFIKPSTLINFDVTVQNVKWDRIGGYKQVKERFRQLIEWPLKYQDTFKRLSLNNSSGLLLHGPSGCGKSLMVKAIATEMSINFISIKGSDIYSKWLGESERIIRDLFKSARLSSPCIMFFDEIDSLTLSRGSGDDNEDGGTSKRILSQLLNEMDGIQVKSQIFLIGCTNSIQSIDSALLRPGRFESLIHIDLPSLDDRLDILNVLSTNSLNFNKDEITQQVWLDIATQTSGFTGSQLYDLCNQAGIIQLETDIVNSQSISKQSLYESLNKLKN

SEQ ID NO: 23227 - protein, 452 aa, Dactylis glomerata
MAQEEKEKPDESTSSRRPQAKETKPNPAPEPEPEMATVAMDISKPPPAAAGDDSAKGARAGGEGLRQYYLQHIHDLQLQIRTKTHNLNRLEAQRNDLNSKVRALREELQLLQEPGSYVGEVVKVMGKSKVLVKVHPEGKYVVDIDKSIDITKITPSTRVALRNDSYMLHLILPSKVDPLVNLMKVEKVPDSTYDMIGGLDQQIKEIKEVIELPIKHPELFESLGIAQPKGVLLYGPPGTGKTLLARAVAHHTDCTFIRVSGSELVQKYIGEGSRMVRELFVMAREHAPSIIFMDEIDSIGSARMESGTGNGDSEVQRTMLELLNQLDGFEASNKIKVLMATNRIDILDQALLRPGRIDRKIEFPNPNEDSRGDILKIHSTTMNLMRGIDLKKIAGKMNGASGAELKAVCTEAGMFALRERRVHVTQEDFEMAVAKVMKKDNEKNMSLRKLWK

SEQ ID NO: 23228 - protein, 809 aa, Oryza sativa
  unsure (1)..(809): unsure at all Xaa locations
MASQGEPSSSSDPKGKKDFSTAILERKKSPNRLVVDEATNDDNSVIGMHPDTMEKLQLFRGDTVLLKGKKRKDTICIVLADDTCEEPKIRMNKVVRKNLRVRLGDVVSVHQCPDVKYGKRVHILPIDDTVEGITGNLFDAFLKPYFLEAYRPLRKGDLFLVRGGMRSVEFKVIETDPAEYCIVAPDTEIFCDGEPIKREDEERLDEVGYDDVGXGVRKQMAQIRELVELPLRHPQLFKSIGVKPPKGILLYGPPGSGKTLIARAVANETGAFFFLINGPEIMSKLAGESESNLRKAFEEAEKNAPSIIFIDEIDSIAPKREKTNGEVERRIVSQLLTLMDGLKARSHVIVMGATNRPNSIDPALRRFGRFDREIDIGVPDEVGRLEVLRIHTKNMKLAEDVDLEHIAKDTHGYVGADLAALCTEAALQCIREKMDIIDLEDETIDAEILNSMAVTNDHFKTALGTSNPSALRETVVEVPNVSWEDIGGLENVKRELQETVQYPVEHPEKFEKFGMSPSKGVLFYGPPGCGKTLLAKAIANECQANFISVKGPELLTMWFGESEANVREIFDKARQSAPCVLFFDELDSIATQRGSSVGDAGGAADRVLNQLLTEMDGMNAKKTVFIIGATNRPDIIDPALLRPGRLDQLIYIPLPDEQSRLQIFKACLRKSPVAKDVDLNALAKYTQGFSGADITEICQRACKYAIRENIEKDIERERRSKENPEAMEEDEVDDIAEIKAAHFEESMKYARRSVSDADIRKYQAFAQTLQQSRGFGSEFRFERTEAGAGAAADPFASAAAVADDDDLYS

SEQ ID NO: 23229 - protein, 806 aa, Oryza sativa
  unsure (1)..(806): unsure at all Xaa locations
MASQGEPSSSADPKGKKDYSTAILERKKSPNRLVVDEATNDDNSVVALHPDTMERLQLFRGDTVLLKGKKRKDTICIVLADETCEEPKIRMNKVVRKNLRVRLGDVVSVHQCQDVKYGKRVHILPIDDTVEGITGNLFDAFLKPYFLEAYRPVRKGDLFLVRGGMRSVEFKVIETDPTEYCIVAPDTEIFCDGEPIKREDEERLDEVGYDDVGGVRKQMAQIRELVELPLRHPQLFKSIGVKPPKGILLYGPPGSGKTLIARAVANETGAFFFLINGPEIMSKLAGESESNLRKAFEEAEKNAPSIIFIDEIDSIAPKREKTHGEVERRIVSQLLTLMDGLKARSHVIVMGATNRPNSIDPALRRFGRFDREIDIGVPDEVGRLEVLRIHTKNMKLAEDVDLEHIAKDTHGYVGADLAALCTEAALQCIREKMDIIDLEDETIDAEILNSMAVTNDHFKTALGTSNPSALRETVVEVPNVSWEDIGGLENVKRELQETVQYPVEHPEKFEKFGMSPSKGVLFYGPPGCGKTLLAKAIANECQANFISVKGPELLTMWFGESEANVREIFDKARQSAPCVLFFDELDSIATQRGSSVGDAGGAADRVLXVTEXDGMNAKKTVFIIGATNRPDIIDPALLRPGRLDQLIYIPLPDEQSRLQIFKACLRKSPVAKDVDLNALAKYTQGFSGADITEICQRACKYAIRENIEKDIERERRSKENPEAMEEDEVDDIAEIKAAHFEESMKYARRSVSDADIRKYQAFAQTLQQSRGFGSEFRFERTEAGAGAAADPFASAAAVADDDDLYS

SEQ ID NO: 23230 - protein, 838 aa, Oryza sativa
  unsure (1)..(838): unsure at all Xaa locations
YGFHRDIXXKTADNINQVFEVTVFALLIKNRKIPELVRRGLGKGKKDFSTAILERKKSPNRLVVDEATNDDNSVIGMHPDTMEKLQLFRGDTVLLKGKKRKDTICIVLADDTCEEPKIRMNKVVRKNLRVRLGDVVSVHQCPDVKYGKRVHILPIDDTVEGITGNLFDAFLKPYFLEAYRPLRKGDLFLVRGGMRSVEFKVIETDPAEYCIVAPDTEIFCDGEPIKREDEERLDEVGYDDVGGVRKQMAQIRELVELPLRHPQLFKSIGVKPPKGILLYGPPGSGKTLIARAVANETGAFFFLINGPEIMSKLAGESESNLRKAFEEAEKNAPSIIFIDEIDSIAPKREKTHGEVERRIVSQLLTLMDGLKARSHVIVMGATNRPNSIDPALRRFGRFDREIDIGVPDEVGRLEVLRIHTKNMKLAEDVDLEHIAKDTHGYVGADLAALCTEAALQCIREKMDIIDLEDETIDAEILNSMAVTNDHFKTALGTSNPSALRETVVEVPNVSWEDIGGLENVKRELQETVQYPVEHPEKFEKFGMSPSKGVLFYGPPGCGKTLLAKAIANECQANFISVKGPELLTMWFGESEANVREIFDKARQSAPCVLFFDELDSIATQRGSSVGDAGGAADRVLNQLLTEMDGMNAKKTVFIIGATNRPDIIDPALLRPGRLDQLIYIPLPDDQSRLQIFKACLRKSPVAKDVDLNALAKYTQGFSGADITEICQRACKYAIRENIEKDIEMEKRRKDNPEAMEEDEVDDIAEIKAAHFEESMKYARRSVSDADIRKYQAFAQTLQQSRGFGTEFRFADQPASGAGAAADPFASAAAAADDDDLYS

SEQ ID NO: 23231 - protein, 811 aa, Oryza sativa
HVGPTLSQLGTGPPPSSGKKDFSTAILERKKSPNRLVVDEATNDDNSVIGMHPDTMEKLQLFRGDTVLLKGKKRKDTICIVLADDTCEEPKIRMNKVVRKNLRVRLGDVVSVHQCPDVKYGKRVHILPIDDTVEGITGNLFDAFLKPYFLEAYRPLRKGDLFLVRGGMRSVEFKVIETDPAEYCIVAPDTEIFCDGEPIKREDEERLDEVGYDDVGGVRKQMAQIRELVELPLRHPQLFKSIGVKPPKGILLYGPPGSGKTLIARAVANETGAFFFLINGPEIMSKLAGESESNLRKAFEEAEKNAPSIIFIDEIDSIAPKREKTHGEVERRIVSQLLTLMDGLKARSHVIVMGATNRPNSIDPALRRFGRFDREIDIGVPDEVGRLEVLRIHTKNMKLAEDVDLEHIAKDTHGYVGADLAALCTEAALQCIREKMDIIDLEDETIDAEILNSMAVTNDHFKTALGTSNPSALRETVVEVPNVSWEDIGGLENVKRELQETVQYPVEHPEKFEKFGMSPSKGVLFYGPPGCGKTLLAKAIANECQANFISVKGPELLTMWFGESEANVREIFDKARQSAPCVLFFDELDSIATQRGSSVGDAGGAADRVLNQLLTEMDGMNAKKTVFIIGATNRPDIIDPALLRPGRLDQLIYIPLPDDQSRLQIFKACLRKSPVAKDVDLNALAKYTQGFSGADITEICQRACKYAIRENIEKDIEMEKRRKDNPEAMEEDEVDDIAEIKAAHFEESMKYARRSVSDADIRKYQAFAQTLQQSRGFGTEFRFAEPASGAGAAADPFASAAAAADDDDLYS

SEQ ID NO: 23232 - protein, 316 aa, Oryza sativa
AFVETVQYPVEHPEKFEKFGMSPSKGVLFYGPPGCCKTLLAKAIANECQANFISVKGPELLTMWFGESEANVREIFDKARQSAPCVLFFDELDSIATQRGSSVGDAGGAADRVLNQLLTEMDGMNAKKTVFIIGATNRPDIIDPALLRPGRLDQLYLLPLPDDQSRLQIFKACLRKSPVAKDVDLNALAKYTQGFSGADITEICQRACKYAIRENIEKDIEMEKRRKDNPEAMEEDEVDDIAEIKAAHFEESMKYARRSVSDADIRKYQAFAQTLQQSRGFGTEFRFADQPASGAGAAADPFASAAAAADDDDLYS

SEQ ID NO: 23233 - protein, 475 aa, Oryza sativa
  unsure (1)..(475): unsure at all Xaa locations
TVDLPXRHERLFHSLLTEPRKGILLSGPPGTGKTSLATSCAYDEGVNLFTINGPEIISQYYGESEQALYDVFSSAKQAAPAVIFIDELDAIAPERKDGSEELSIRIVVTLLKLIDAMSPRDRVLVIAATNRPDSIDPALKRPERLDRKIEIGVPSPVQRLDILQHLLVGVQHSLSCEQLESLASATHGFVGADLAALCNEAALSALRRYISLKKKNNGSSGKKDDLLLLVTTEDFEKAKIKVRPSAMREVSLELPKIRWEDVGGQVRIKEQLIEAIELPQKNPKAFENMGVSPPRGLLMIGPPGCSKTLMARAVASEAKLNFLAVKGPELFSKWVGDSEKAVRSLFAKARDNAPAILFFDEIDGLAVTRGRENDSAVGDRVLSQLLVEMDGLEQRIGVTVIAATNRPDKIDCALLRPGRFDRLLDVQPPDEADRVDIFRIHTRNMPCSHDVNLNELARLTEGYTGADIKLVCREA

SEQ ID NO: 23234 - protein, 858 aa, Triticum aestivum
  unsure (1)..(858): unsure at all Xaa locations
MLISFKLKKKKKKTQRPGERRTQAPKPSAPPTTPGSARHGDPQPAAAPAGRALLLRRSXKAKKDYSTAILERKKSPNRLVVDEATNDDNSVVALHPDTMERLQLFRGDTVLLKGKKRKDTICIVLADDTCEEPKVRMNKTVRKNLRVRLGDVVSVHQCPDVKYGKRVHILPIDDTVEGITGNLFDAFLKPYFLEAYRPLRKGDLFLVRGGMRSVEFKVIETDPAEYCIVAPDTEIFCDGEPVKREDEERLDDVGYDDVGGVRKQMAQIRELVELPLRHPQLFKSIGVKPPKGILLFGPPGSGKTLIARAVANETGAFFFLINGPEIMSKLAGESESNLRKAFEEAEKNAPSIIFIDEIDSIAPKREKTNGEVERRIVSQLLTLMDGLKSRAHVIVMGATNRPNSIDPALRRFGRFDREIDIGVPDEVGRLEVLRIHTKNMKLAEDVELEHISRDTHGYVGADLAALCTEAALQCIREKMDIIDLEDETIDAEILNSMAVTNDHFKTALTTSNPSALRETVVEVPNVSWEDIGGLENVKRELQETVQYPVEHPEKFEKFGMSPSKGVLFYGPPGCGKTLLAKAIANECQANFISIKGPELLTMWFGESEANVREIFDKARGSAPCVLFFDELDSIATQRGSSVGDAGGAADRVLNQLLTEMDGMNAKKTVFIIGATNRPDIIDPALLRPGRLDQLIYIPLPDVESRHQIFKACLRKSPLAKDIDLSALAKYTQGFSGADITEICQRACKYAIRENIEKDIERERRRKDNPEAMEEDEVDEVAEIRAAHFEESMKYARRSVSDADIRKYQAFAQTLQQSRGFGSEFRFPDXAGRGXXASAAAADPFASAAAAAEDDDLYS

SEQ ID NO: 23235 - protein, 820 aa, Triticum aestivum
  unsure (1)..(820): unsure at all Xaa locations
MATPNPPPPQQDEPSSSADPKAKKDYSTAILERKKSPNRLVVDEATNDDNSVVALHPDTMERLQLFRGDTVLLKGKKRKDTICIVLADDTCEEPKVRMNKTVRKNLRVRLGDVVSVHQCPDVKYGKRVHILPIDDTVEGITGNLFDAFLKPYFLEAYRPLRKGDLFLVRGGMRSVEFKVIETDPAEYCIVAPDTEIFCDGEPVKREDEERLDDVGYDDVGGVRKQMAQIRELVELPLRHPQLFKSIGVKPPKGILLFGPPGSGKTLIARAVANETGAFFFLINGPEIMSKLAGESESNLRKAFEEAEKNAPSIIFIDEIDSIAPKREKTNGEVERRIVSQLLTLMDGLKSRAHVIVMGATNRPNSIDPALRRFGRFDREIDIGVPDEVGRLEVLRIHTKNMKLAEDVELEHISRDTHGYVGADLAALCTEAALQCIREKMDIIDLEDETRAAGLXLDAAGVDRIHVNSALMTSNLSASRENDIAVLDNFKRDLRGRNNVKREWQETDLYPVEHLENFEKFGMSPSKGVLFYGPPGCGKTLLAKAHANECQANFISIKGPELLTMWFGESEANVREIFDKARGSAPCVLFFDELDSIATQRGSSVGDAGGAADRVLNQLLTEMDGMNAKKTVFIIGATNRPDIIDPALLRPGRLDQLIYIPLPDVESRHQIFKACLRKSPLAKDIDLSALAKYTQGFSGADITEICQRACKYAIRENIEKDIERERRRKDNPEAMEEDEVDEVAEIRAAHFEESMKYARRSVSDADIRKYQAFAQTLQQSRGFGSEFRFPDXAGRGXXASAAAADPFASAAAAAEDDDLYS

SEQ ID NO: 23236 - protein, 576 aa, Triticum aestivum
  unsure (1)..(576): unsure at all Xaa locations
XAFKSIGVKPXKGILLFGPPGSGKTLIARAVANETGAFFFLINGPEIMSKLAGESESNLRKAFEEAEKNAPSIIFIDEIDSIAPKREKTNGEVERRIVSQLLTLMDGLKSRAHVIVMGATNRPNSIDPALRRFGRFDREIDIGVPDEVGRLEVLRIHTKNMKLAEDVELEHISRDTHGYVGADLAALCTEAALQCIREKMDIIDLEDETIDAEILNSMAVTNDHFKTALTTSNPSALRETVVEVPNVSWEDIGGLENVKRELQETVQYPVEHPEKFEKFGMSPSKGVLFYGPPGCGKTLLAKAIANECQANFISIKGPELLTMWFGESEANVREIFDKARGSAPCVLFFDELDSIATQRGSSVGDAGGAADRVLNQLLTEMDGMNAKKTVFIIGATNRPDIIDPALLRPGRIHQLIYIPLPDVESRHQIFRGCLXLLLHGPGYYADQLPREEAQEAGDLGRELPWQELQGQQVLEKDIERDMRRKDHPQVVGRVGVDEVAEIRAAHFEESMKYARRSVSDADIRKYQAFAQTLQQSRGFGSEFRFPDQPAAGASSAAAADPFASAAAAADDDDLYS

SEQ ID NO: 23237 - protein, 772 aa, Novosphingobium aromaticivorans
MADAATEARTEGRTVRLQVAGARQEESGHGIARISRHVMSQLGVTEGDVIEIVGKRATAARVIQPYPEDEGLELIRLDGLQRANADVGSGEHVEVRKIDSRPAQRVVFAPAQKDLRLQGPAVALKRNFAGRPLVTGDLVATAGQQQVNRTDMPPQLRQMLNAPAFALTQIRLTVVSTSPKGVVHIDENTEVELRPEYEEPRSSRADVNYDDVGGMGDTIRQLREMVELPLRYPELFTRLGVDPPKGVLLHGPPGTGKTRLARAVANESDASFFTINGPEIMGSAYGESEKRLREVFEEATANSPSIIFIDEIDSIAPKRSEVHGEAEKRLVAQLLTLMDGLHSRSNLVVIAATNRPDAIDEALRRPGRFDREIVVGVPDESGRREILGIHTRGMPLAEDVDLQELARTTHGFVGADLAALAREAAIEAVRRIMPRLDFEQQTIPQDVLDSLRVERDDFLEALKRVQPSAMREVMVQAPTIGWADIGGLDEAQEKLREGVELPLKNPEAFHRLGIRPAKGFLLYGPPGTGKTLLAKAVAKEAEANFIAIKSSDLLSKWYGESEQQIARLFARARQVAPCVVFIDEIDSLVPARGSGQGEPNVTARVVNTILAEMDGLEELQSVVLIGATNRPNLVDPALLRPGRFDELVYVGTPSMSGREHILGIHTRNMPLAPDVDLALVARATDRFTGADLEDVVRRAGLNAIRRGGGNVDQVKASDFDEALEDSRATVTEQMEEEYGRMKGELKKRAMNPGPLGFIVPGMVQPTRESKHG

SEQ ID NO: 23238 - protein, 815 aa, Schizosaccharomyces pombe
MNAPSTMTDKKPEVEHLQGENPPKDTYSAEDTATAILRKKRKPNSLVVDDATNDDNSVITLSSNTMETLQLFRGDTVVVKGKRRKDTVLIVLTDEEMEDGVARINRVVRNNLRVRLGDIVTINPCPDIKYAERISVLPLADTVEGLTGSLFDVYLKPYFVEAYRPIRKGDLFVVRGSMRQVEFKVVDVAPDEFGIVSQDTIIHWEGEPINREDEESSLAEVGYDDIGGCRRQMAQIRELVELPLRHPQLFKSIGIKPPRGILMYGPPGTGKTLMARAVANETGAFFFLINGPEIMSKMAGESESNLRKAFEEAEKNSPAIIFIDEIDSIAPKREKTNGEVERRVVSQLLTLMDGMKARSNVVVMAATNRPNSIDPALRRFGRFDREVDVGIPDPTGRLEILRIHTKNMKLADDVDLEQIAAETHGYVGSDLASLCSEAAMQQIREKMDMIDLDEDEIDAEVLDSLGVTMDNFRFALGSSNPSALRETVVEVPNVRWEDIGGLEEVKRELRETVQMPVMYAEKFLRFGVTPSKGVLFFGPPGTGKTLLAKAIANECSANFISVKGPELLSMWFGESESNVRDIFDKARAAAPCVVFLDELDSIAKARGASAGDSGGGDRVVNQLLTEMDGVNSKKNVFVIGATNRPDQIDPALMRPGRLDQLIYVPLPDEEARFSILQTQLRHTPVAEDVDLRAVAKATHGFSGADLEFVVQRAVKLAIKDSIEEDIKRENETGEAPADDVVMDEDASVSQVQRHHVEEAMKMARRSVSDAEVRRYEAYAHQLLTSRGLTGFQFDSADSNTNGPSFGNDGADDLYA

SEQ ID NO: 23239 - protein, 418 aa, Schizosaccharomyces pombe
MNAPSTMTDKKPEVEHLQGENPPKDTYSAEDTATAILRKKRKPNSLVVDDATNDDNSVITLSSNTMETLQLFRGDTVVVKGKRRKDTVLIVLTDEEMEDGVARINRVVRNNLRVRLGDIVTINPCPDIKYAERISVLPLADTVEGLTGSLFDVYLKPYFVEAYRPIRKGDLFVVRGSMRQVEFKVVDVAPDEFGIVSQDTIIHWEGEPINREDEESSLAEVGYDDIGGCRRQMAQIRELVELPLRHPQLFKSIGIKPPRGILMYGPPGTGKTLMARAVANETGAFFFLINGPEIMSKMAGESESNLRKAFEEAEKNSPAIIFIDEIDSIAPKREKTNGEVERRVVSQLLTLMDGMKARSNVVVMAATNRPNSIDPALRRFGRFDREVDVGIPDPTGRLEILRIHTKNMKLADDVDLEQ

SEQ ID NO: 23240 - protein, 432 aa, Schizosaccharomyces pombe
DREVDVGIPDPTGRLEILRIHTKNMKLADDVDLEQIAAETHGYVGSDLASLCSEAAMQQIREKMDMIDLDEDEIDAEVLDSLGVTMDNFRFALGSSNPSALRETVVEVPNVRWEDIGGLEEVKRELRETVQMPVMYAEKFLRFGVTPSKGVLFFGPPGTGKTLLAKAIANECSANFISVKGPELLSMWFGESESNVRDIFDKARAAAPCVVFLDELDSIAKARGASAGDSGGGDRVVNQLLTEMDGVNSKKNVFVIGATNRPDQIDPALMRPGRLDQLIYVPLPDEEARFSILQTQLRHTPVAEDVDLRAVAKATHGFSGADLEFVVQRAVKLAIKDSIEEDIKRENETGEAPADDVVMDEDASVSQVQRHHVEEAMKMARRSVSDAEVRRYEAYAHQLLTSRGLTGFQFDSADSNTNGPSFGNDGADDLYA

SEQ ID NO: 23241 - protein, 809 aa, Schizosaccharomyces pombe
MSVAIKFTVKINDGSLRRQQTRHVFLSPAALNRLKLSPSQVIYLKHKGGEAVGITQSVKGNGIGPFEILISPLLAKWANLKAFQRVNISQYVHPLKEAEGIKIVASLSSNNEPIPESLIRKELLEIRYLHPGMIVMGESPMNMAKSGSKNLSSENMATEIFEINSGLSAQSGTEVGSSQSSPSVNESEPKATEDLDELSPGSYKVKEIHIRSPSNLIEAISDMSLDEPRIYKFTAASSMEIETPDLLKLPHEDRTQSAYNQGSEETQNFDGPPSAVTFSSIGGLQAQIAQIRDIVELPFQNPELFKFFNIMPPRGVLLYGPPGTGKTMVMRAVAAEANAQVFTIDGPSVVGKYLGETESRLRKIFEDARAHQPSIIFIDEIDALAPKRTEDVSEAESRAVATLLTLLDGMANAGKVVVIAATNRPNSIDEALRRPGRLEKEIEIGIPDKSARLDIIKLLLSGVPNEINDAQLEDLASRTHAYVGADLAAVVREAALRAIKRTISLQKDTSGLDIFGAVQMDDLEFALSSVRQSAMREFMMESPNVHWSDIGGQEEVKQKLKESVEWPLTHGETFSRLGVRPPKGVLLYGPPGCSKTITAKAIATETGLNFIAVKGPELFDKFVGESERAVRQVFQKARQASPSVIFFDEIDALTANRGEDNSSDRVVAALLNELDGIEALRNVLVLAATNRPDMIDPALMRPGRLDRLLYVGPPNFEARKQIVKIQAEKMKFAEDVDLDLIAEKTEGCSGAEVVALCQEAGLIAMHEDLEAKEICQAHFKTALLALRKAITRDMLEYYASFSESVTSIS

SEQ ID NO: 23242 - protein, 779 aa, Schizosaccharomyces pombe
MRRSGTSLSRDLERKIHERLVSLKDTIQQTEIEEWPVSTRRAIQFVQERDMSLRRIKKPILEKVVEKVLDTLKAEVEEKLASSQDLVLVDSDMEEQSDSNLMEVKDTNVINKSITSLWSSPNLKEIDGEDEKKSVGQESITGSAKRKDRRSKTNGSKRQKAEANREPPSDISLSDIGGLDDCINELLELVAMPIKHPEVYQYTGIHPPRGVLLHGPPGCGKTMLANALANELGVPFISISAPSIVSGMSGESEKKVREVFEEAKSLAPCLMFIDEIDAVTPKRESAQREMERRIVAQFLTCMDELSFEKTDGKPVLVIGATNRPDSLDSALRRAGRFDREICLTVPSQDAREKILRTMAKGLKLSGDFDFRQLAKQTPGYVGADLKALTAAAGIIAIKRIFNEISPLNKLDLNSDPRFNELDSDMALDSNDSLPLDHSSIIQRYLNAHPDPLSPEELEPLAICPQDFIEALAKVQPSSKREGFATVPGVSWNNIGALKSIRVELQMAIVQPIKRPELYQSVGISAPTGVLLWGPPGCGKTLLAKAVANESKANFISIRGPELLNKYVGESERAVRQVFLRARASSPCVIFFDELDAMVPRRDDSLSEASSRVVNTLLTELDGLSDRSGVYVIAATNRPDIIDPAMLRPGRLDKTLLVDLPDAHERVEILKTLTKQTPLHEEVNLDVLGRDERCSNFSGADLAALVREAAVTALRSAVFADIASNEPEITQHSALEPIRVTNADFELAFKNIKPSVSDRDRQKYQRLAKRWSSASTNDAD

SEQ ID NO: 23243 - protein, 948 aa, Schizosaccharomyces pombe
MENRICTLAKPLPKLDESKQAWVSYLWLKKALPGFEEHSAYVYMTTNPTIAGRIFLPINNEDLEDGTVEISGYDNLLADALYISTIAPVKLDFVQLIVIDDNSQDQDAIIERIKGRNAILMESDFINQNILVQVCQPVRHGVVDSETKFVIERKDSFTFLASNEKNISSFKRGKTETDAELVIRPSKVHTEIQWCLQNCSLIHVPFELLFNVGKKNGCPISLRLSDGKNVYGIASIKSDTEHDSVQLSPSLHYFDEFNESVISEEGTEAFLVARGPSVGIASRISLRTIPTQSCFSEKLLKAANLCVVQQVKQKVFLQSKQIFCVPINSLMANSDSVDILELTRNTDAYIWYSVEEIDPLNTYNIYYTNEDTSIVLDTQLSHRLLPSLRKPLLNFVKVHPPSQKLLRFCRAFFDPQQVPGFNPFFLLHGNPFTGKTKAVEEVASLFSAPVFTISSYEFADATADHLEAKLDMFVQNVVKSPCAIIFVKDLDVLSISSDEGNIVPGSKSIQILLSKIDLVKSPQGRYIVIGTCHSIEKIPYEILSESFFELKFSELEMDERLELLKIYANNVIIDKRISLKDVALKTNSMSFGELECLPDHMTKAAVDRIKRTGYDNDSIILSGPIITEQDVDVSINRIRKEKSNTIFTVPKVNWDDIGGLEEAKTVLRDTLQLPLQFPELFSQGLKPRSGVLLYGPPGTGKTLLAKAVATELSLEFVSIKGPELLNMYVGESEANVRNVFEKARNSSPCVIFFDELDSIAPHRGNSSDSGNVMDRVVSQLLAELDSISKDNNKYVFVIGATNRPDLLDPSLLRPGRFDKLVYLGINKSEESKASMLRALTKTFKLDETIDLNEIAKNCHPNFTGADMYALCSDAVLSAIKRKTNEIDLLIQASGTDLSTEEFFKRNENQDSLELRITKEDFLTSLKKLRPSISEQELHRYEMVRHQFS

SEQ ID NO: 23244 - protein, 835 aa, Saccharomyces cerevisiae
MGEEHKPLLDASGVDPREEDKTATAILRRKKKDNMLLVDDAINDDNSVIAINSNTMDKLELFRGDTVLVKGKKRKDTVLIVLIDDELEDGACRINRVVRNNLRIRLGDLVTIHPCPDIKYATRISVLPIADTIEGITGNLFDVFLKPYFVEAYRPVRKGDHFVVRGGMRQVEFKVVDVEPEEYAVVAQDTIIHWEGEPINREDEENNMNEVGYDDIGGCRKQMAQIREMVELPLRHPQLFKAIGIKPPRGVLMYGPPGTGKTLMARAVANETGAFFFLINGPEVMSKMAGESESNLRKAFEEAEKNAPAIIFIDEIDSIAPKRDKTNGEVERRVVSQLLTLMDGMKARSNVVVIAATNRPNSIDPALRRFGRFDREVDIGIPDATGRLEVLRIHTKNMKLADDVDLEALAAETHGYVGADIASLCSEAAMQQIREKMDLIDLDEDEIDAEVLDSLGVTMDNFRFALGNSNPSALRETVVESVNVTWDDVGGLDEIKEELKETVEYPVLHPDQYTKFGLSPSKGVLFYGPPGTGKTLLAKAVATEVSANFISVKGPELLSMWYGESESNIRDIFDKARAAAPTVVFLDELDSIAKARGGSLGDAGGASDRVVNQLLTEMDGMNAKKNVFVIGATNRPDQIDPAILRPGRLDQLIYVPLPDENARLSILNAQLRKTPLEPGLELTAIAKATQGFSGADLLYIVQRAAKYAIKDSIEAHRQHEAEKEVKVEGEDVEMTDEGAKAEQEPEVDPVPYITKEHFAEAMKTAKRSVSDAELRRYEAYSQQMKASRGQFSNFNFNDAPLGTTATDNANSNNSAPSGAGAAFGSNAEEDDDLYS

SEQ ID NO: 23245 - protein, 780 aa, Saccharomyces cerevisiae
MAPKSSSSGSKKKSSASSNSADAKASKFKLPAEFITRPHPSKDHGKETCTAYIHPNVLSSLEINPGSFCTVGKIGENGILVIARAGDEEVHPVNVITLSTTIRSVGNLILGDRLELKKAQVQPPYATKVTVGSLQGYNILECMEEKVIQKLLDDSGVIMPGMIFQNLKTKAGDESIDVVITDASDDSLPDVSQLDLNMDDMYGGLDNLFYLSPPFIFRKGSTHITFSKETQANRKYNLPEPLSYAAVGGLDKEIESLKSAIEIPLHQPTLFSSFGVSPPRGILLHGPPGTGKTMLLRVVANTSNAHVLTINGPSIVSKYLGETEAALRDIFNEARKYQPSIIFIDEIDSIAPNRANDDSGEVESRVVATLLTLMDGMGAAGKVVVIAATNRPNSVDPALRRPGRFDQEVEIGIPDVDARFDILTKQFSRMSSDRHVLDSEAIKYIASKTHGYVGADLTALCRESVMKTIQRGLGTDANIDKFSLKVTLKDVESAMVDIRPSAMREIFLEMPKVYWSDIGGQEELKTKMKEMIQLPLEASETFARLGISAPKGVLLYGPPGCSKTLTAKALATESGINFLAVKGPEIFNKYVGESERAIREIFRKARSAAPSIIFFDEIDALSPDRDGSSTSAANHVLTSLLNEIDGVEELKGVVIVAATNRPDEIDAALLRPGRLDRHIYVGPPDVNARLEILKKCTKKFNTEESGVDLHELADRTEGYSGAEVVLLCQEAGLAAIMEDLDVAKVELRHFEKAFKGIARGITPEMLSYYEEFALRSGSSS

SEQ ID NO: 23246 - protein, 837 aa, Saccharomyces cerevisiae
MVKVKSKKNSLTSSLDNKIVDLIYRLLEEKTLDRKRSLRQESQGEEGENNEGEEDEDIFESMFFAKDLTAGEIFTFCLTKDLSLQRVKKVVLQKTIDRMLKDVIESELEEFGSYPGYNNEEEEKPSLEEELAKKNMMIERDTNEMNKRITSTWSKSGSVSESITETDDPKTEEVKKSKKRSKEGTCKVKRQKIKEDRSPPNSSLKSLGGMDDVVAQLMELIGLPILHPEIFLSTGVEPPRGVLLHGPPGCGKTSIANALAGELQVPFISISAPSVVSGMSGESEKKIRDLFDEARSLAPCLVFFDEIDAITPKRDGGAQREMERRIVAQLLTSMDELTMEKTNGKPVIIIGATNRPDSLDAALRRAGRFDREICLNVPNEVSRLHILKKMSDNLKIDGAIDFAKLAKLTPGFVGADLKALVTAAGTCAIKRIFQTYANIKSTPTTATDSSEDNMEIDETANGDESSLKNTANMIDPLPLSVVQQFIRNYPEPLSGEQLSLLSIKYEDFLKALPTIQPTAKREGFATVPDVTWANVGALQRVRLELNMAIVQPIKRPELYEKVGISAPGGVLLWGPPGCGKTLLAKAVANESRANFISIKGPELLNKYVGESERSIRQVFTRARASVPCVIFFDELDALVPRRDTSLSESSSRVVNTLLTELDGLNDRRGIFVIGATNRPDMIDPAMLRPGRLDKSLFIELPNTEEKLDIIKTLTKSHGTPLSSDVDFEEIIRNEKCNNFSGADLAALVRESSVLALKRKFFQSEEIQSVLDNDLDKEFEDLSVGVSGEEIIVTMSDFRSALRKIKPSVSDKDRLKYDRLNKKMGLTEEMKDAEEMKQ

SEQ ID NO: 23247 - protein, 745 aa, Thermoplasma volcanium
MDNSSGIILRVAEANSTDPGMSRVRLDESSRRLLDAEIGDVVEIEKARKTVGRVYRARPEDENKGIVRIDSVMRNNCGASIGDKVRVRKVRTEIAKKVTLAPIIRKDQRLKFGEGIEEYVQRALIRRPMLEQDNISVPGLTLAGQTGLLFKVVKTMPGKVPVEIGEETKIEIREEPASEVLEEVSRVSYEDIGGLSEQLGKIREMIELPLKHPELFERLGITPPKGVILYGPPGTGKTLIARAVANESGANFLSINGPEIMSKYYGQSEQKLREIFSKAEETAPSIIFIDEIDSIAPKREEVQGEVERRVVAQLLTLMDGMKERGHVIVIGATNRIDAVDPALRRPGRFDREIEIGVPDRNGRKEILMIHTRNMPLGMDEEQKNKFLEEMADYTYGFVGADLAALVRESAMNALRRYLPEIDLDKPIPTEILEKMVVTEEDFKNALKNIEPSSLREVMVEVPNVHWDDIGGLEDVKREVKETVELPLLKPDVFKRLGIRPSKGFLLYGPPGVGKTLLAKAVATESNANFISIKGPEVLSKWVGESEKAIREIFKKAKQVAPAIVFLDEIDSIAPRRGTTSDSGVTERIVNQLLTSLDGIEVMNGVVAIGATNRPDIMDPALLRAGRFDKLIYIPPPDKDARLSILKVHTKNMPLAPDVDLDSIAQRTEGYVGADLENLCREAGMNAYRENPDATQVSQKNFIDALKTIRPSIDEEVIKFYKSISETMGKSVSEKRKELQDQGLYL

SEQ ID NO: 23248 - protein, 375 aa, Thermoplasma volcanium
MSDDVQNKIEKATKLLHAGIKEEENGHKDKAKEYYLVAYRVMLEAANDSPSDLKKKRLDQCALILNAYKRVSGERTDFTVKKQNDDEIVEGEALLEEIGIEKPEIPKVTFEDVAGLDDVKNEILGKIIYPMKFKELSQEYNIQFGGGMLLYGPPGTGKTFIVKAIANEVKARFINVNPSTLYSEWFGVFEKNISKLFRAASLLSPAIIFFDEIDALVPKRDTSNSDAAKRGVAQLLNEVGGINSQKNKNIFIIAATNNPWEVDEAMLRPGRFDIKIYVPPPDIVARKKIFQLNLAKIKQVGNVDYDLLAEETEGYSGADIEFICKKAAQNVFMEAVKTGKSRPVETRDVIDVIGSIKPSIDYELLEKYSKYGSAF

SEQ ID NO: 23249 - protein, 824 aa, Neurospora crassa
MAPEPNPDHVEQKKKVNLMDASGAEHKAEDDTATAILKKKKKPNQLMVTDAVNDDNSIIALSNNTMEQLQLFRGDTVLVRGKKRKDTVLIVLADDDLDDGSARLNRVVRHNLRVKHGDIITIHPCPDIKYAKRIAVLPIADTVEGITGSLFDVFLAPYFREAYRPVRQGDLFIVRGGMRQVEFKVVEVDPPEYGIVAQDTVIHCEGEPIQRDEEENNLNEVGYDDIGGCRKQMAQIREMVELPLRHPQLFKSIGIKPPRGVLLYGPPGTGKTLMARAVANETGAFFFLINGPEIMSKMAGESESNLRKAFEEAEKNSPAIIFIDEIDSIAPKREKTNGEVERRVVSQLLTLMDGMKARSNVVVMAATNRPNSIDPALRRFGRFDREVDIGIPDPTGRLEILQIHTKNMKLADDVDLEQIAAETHGYVGSDIAALCSEAAMQQIREKMDLIDLDEDTIDAEVLDSLGVTQENFRFALGVSNPSALREVAVVEVPNVRWEDIGGLETVKQELRESVQYPVDHPEKFLKFGLSPSRGVLFYGPPGTGKTMLAKAVANECAANFISVKGPELLSMWFGESESNIRDIFDKARAAAPCVVFLDELDSIAKARGGSVGDAGGASDRVVNQLLTEMDGMTSKKNVFVIGATNRPEQLDPALCRPGRLDSLIYVPLPDEAGRLGILKAQLRKTPVAADVDLNYIASKTHGFSGADLGFITQRAVKIAIKESITADIQRTKEREAAGEDVEMEDEVEDPVPELTKRHFEEAMSMARRSVSDVEIRRYEAFSQQMKNAGPGAFFKFPEGGVESSGNGGAGNSFGDAGNDDDLYN

SEQ ID NO: 23250 - protein, 884 aa, Neurospora crassa
MPGRANLRHGIDRDVYQLVVKLEIEEEDRREAIIEKEGKNSKNLSSRRGLSVSSVYDSIKRSNSSLARQKKKLLEDSIERVLDLRREEAKKDAVEDSDDAIEAADEAEAAKRNKSAEATATGFLNKQIAKAWGLAAPKLPATTAVSGEGVAVVENGGGEAGAAGEGGSGSVPQTPGLGAAAVAPGSSERQANGEPRGKKRKAEKISKEKEVDRSPPTGISIKDIAGVDDTLDKLLHEVWFPLCAGEACAKMGYRYDNGVLLHGPSGCGKTTLAHAVAGSVGAAFIPVSAPSIVGGTSGESEKNIRDVFDEAIRLAPCLIFIDEIDAIAGKRESANKGMEGRIVAEIMNGMDRIKQQTPLGKNVVVLAATNRPDFLDPAIRRRFSAEIDMGMPNERAREHILKSLSRDLNVADDVNFAELAKLTPGYVGSDLQYVVKAAVSESFRGSLDALLEKARQLRAAAAEAATAAITSDSPEGHEEQQKQIQKELDDTLTGISQKQRDWLLLEDHRQASWSDSCITMAQFRLAVSRVQPASKREGFSTIPDTTWAHVGALDEVRKKLEMSIIGPIKRPELFTKVGIKPAAGILLWGPPGCGKTLVAKAVANESKANFISIKGPELLNKYVGESERAVRQLFARAKSSAPCILFFDEMDALVPKRDDSLSDASARVVNTLLTELDGVGDRSGIYVIGATNRPDIIDEAIRRPGRLGTSIYVGLPSAEDRVDILRTLYRNSIARAKASQTAAAAPPRPTPTTTPAVEGDVMDIDGGSGAVLPGQQTPSATAAAMDETMQEAEKQLERVALDLRCTGFSGADLGNLMQAAAQACLERAYLSQMYQSSKESGTPTEEEKVTDMVANPVITPEDWEKALNEVKPSVKDPEKYVHID

SEQ ID NO: 23251 - protein, 802 aa, Neurospora crassa
MGTKSLEFKVRKLQANSTTEKDLAKKQPSRVYVNEEALLELTGSKDGGRAITIEKIDRNSSDDQPVRREATLWKSPERIDKASVQLYDAFRDACGYQAGVQVKVTVQEGKLPEAEEVVLEQLPPEKAGKDAETAASIDPSDLPGWEFFLAGRLSMIEHVHAGLTFKNLYARGPQRSFVVASVNGRPTGNARYLDGKTKVRIGAPSPAGQVDGVPQGKLEVTGVRGLDAQIEKLNDLLSQFTDPWVFQGKPRYRGIVIHGGHGTGKSMLLNTIAATGWGTVYRIQPKDKLADIQDMFQKARLEQPSIILIDQLERLIDKERNNRTSVIQALCEALDTLGADAQETGEIPKVAVVVTCLDYTTDVPEDLKDPGRLTGEVYLPLPDVDGRKEILASFNLRVTPEEEDALLRSLSERTHAYNGKDLRRIVDEAEFIARTRINRVKKTTTPTSTEDVISLDDQPPATEEVSTLLESMHLSPSNASTATTTTTLTSYFLASDYEEALRLVRPSAMHDVNLKPPPIHWSDIGGQASVKVSLRRAVRMSTEPVHVLSRFFARPPKGFLLYGPPGCSKTMAAQAMATESGLNFFAVKGAELLNMYVGESERAVRRLFQRAREVAPSMIFFDEIDSIAGQRAGFGHGGSSTSGGSSSGLNVLTTLLNEMDGFEALTGVVVLAATNRPQALDPALLRPGRFDELIYVSPPDQEARAAIFKKEAEKRQMLIGDEDIKRLATITDGFSGAEIKGICAVAGTRAYDRYLKLDSVEEDTAVGITMEDLEMAAKGMMRQITPEMIRGFEQWEKQFRRY

SEQ ID NO: 23252 - protein, 798 aa, Pyrococcus horikoshii
MMLMVEKKEIKLKVASAYQRDVGRGIVRIDRRSMRELGVSPGDVVEIIGTKNTAAIVWPAYPEDEGLGIIRMDGTIRKNAGVGLGDEVTIRKADVKEARKVVLAPTEPIRFGRDFVEWLHERLVGRPVVRGDYIKIGVLGQELTFVVTTTQPSGVVQITEYTDFDISEKPVKEVEKRMTTGVTYEDIGGLKDVIEKIREMIELPLKHPELFEKLGIEPPKGVLLYGPPGTGKTLLAKAVANEANAYFIAINGPEIMSKYYGESEERLREVFKEAEENAPSIIFIDEIDAIAPKRSEVTGEVEKRVVAQLLALMDGLKGRGKVIVIGATNRPDALDPALRRPGRFDREIEVGVPDKQGRKEILQIHTRGMPIEPDFRKEDVLKILEGLKKEGKFRDVIDKAIDRVMKVSEDDIPKVLKELNGELYEEVRTRLVDLLLEELAEVTHGFVGADLAALAREAAMAALRRLIKEGKIDFEAETIPREVLDELKVTRKDFYEALKMVEPSALREVLIEVPNVHWDDIGGLEEVKQELREAVEWPLKYPEAFRAYGITPPKGVLLYGPPGTGKTLLAKAVATESEANFIAVRGPEVLSKWVGESEKNIREIFRKARQAAPTVIFIDEIDAIAPRRGTDVNRVTDRLINQLLTEMDGIQENTGVVVIAATNRPDILDPALLRPGRFDRLILVPAPDEEARFEIFKVHTRSMPLADDVDLRELARRTEGYTGADIAAVCREAAMIAMRKALEKGIIKPGMKADEIKQKAKVTMKDFEEALKKIGPSVSKETMEYYRKIQEQFKQARG

SEQ ID NO: 23253 - protein, 840 aa, Pyrococcus horikoshii
MILGRSEPQKEEIKLRVAEALKRDVGRGIVRFDRRYQKMIGVEPGDIVEIEGERVTAAIVANSHPDDKGLDIIRMDGYIRKNAGVSIGDYVTIRRAQVKEAKKVVLAPAQKGVIVQIPGDIIKNNLLGRPVVKGDIVVASGRGDLYYSSGTPFDEIFRGFFEAMSVGFGELKFMVVNTIPKGIVQITYNTEVEVLPQAVEVREEKIPEVTYEDIGGLKEAIQKIREMVELPLKHPELFERLGIEPPKGVLLYGPPGTGKTLLAKAVANEANAYFIAINGPEIMSKYYGESEERLREIFKEAEENAPAIIFIDEIDAIAPKREEVVGEVEKRVVSQLLTLMDGLKGRGKVIVIGATNRPDALDPALRRPGRFDREIEVGVPDKQGRKEILQIHTRGMPIEPDFEKDAVIKVLKDLEKDERFEKEKIEKIIEKVSKANSEDEIKEILKEDGNVYVEVRNRLIDKLLEELAEVTHGFVGADLAALAREAAMVVLRRLINEGKINPEAESIPREVLEELKVTKRDFYEALKMVEPSALREVLIEVPNVHWDDIGGLEEVKQELREAVEWPLKYPKAFKKLGITPPKGVLLYGPPGTGKTLLAKAVATESEANFIAVRGPEVLSKWVGESEKRIREIFRKARQAAPAIIFIDEIDAIAPARGTSEGEKVTDRIINQLLTEMDGLVENSGVVVIAATNRPDILDPALLRPGRFDRLILVPAPDEEARFEIFKVHTRSMPLADDVDLRELARRTEGYTGADIAAVCREAALNALRRVVKSVPKEKLEEESEEFLNKLVVTRKDFEEALKKVKPSVSKYMMEYYRQFEEARKRVSGESVGREPDYFTG

SEQ ID NO: 23254 - protein, 752 aa, Guillardia theta
MNRLIVDEINQNADDNSVVYLNSNKIDNLKLFRGDTILIKTKKKKDTVCIIMSDDNCELEKIRINKTVRENLNIGIGDIVTIHHFTDLKFGKRIHVLPFKDSILGYNGNIFEDFLKPYFLDAYRPIKKGDVFNIKSGNNTFDFRVIEIDPVDYCIVGPDTIIFCEGEPLDRLDTVDYEKITYESIGGCQKQLSQIRELVELPLKHPQLFNTVGIKPPRGVLMYGPSGCGKTLIAKAVANETGAFLYSINGPEIMSKLAGESESNLKKAFDEAEKNSPSIIFIDEIDSIAPKRDKSQGEVERRIVSHLLTLLDGINLNSQVVVIACTNRPNSVDQALRRFGRFDREIDISVPDDKGRLEILQIHTKNMLIDNSVDLEAICKETYGFVGADLAQLCTEAALLCIKESIENFDLEEENIPLVVLNSLRVSQDHFKLALDQSNPSAFRETAVEIPNITWEDIGGLENVKRELQETVQYPVEHPEKFEKFGMQPSKGVLFYGPPGCGKTLLAKAIANECQANFISIKGPELLTMWFGESENNVREVFDKARQASPCVLFFDELDSIARARGSSGSDGGGAGDRVINQILTEIDGVGVRKNVFVIGATNRPDILDPAIMRPGRLDQLVYIPLPDRKSRIQIFRATLRKSPLSKEIDLEVLSRATSGFSGADITEICQRACKLAIRESIFKDIQFAKNSESIVSNNEKYIDPVPEITKEHFLEAMKYARRSVSDSDIRKYEMFAQKLQTSRGFSKEIKF

SEQ ID NO: 23255 - protein, 606 aa, Guillardia theta
MNLLKTCIHIDYYEFVLGISKKVIRYNKKTIDHKYNNFSKENNCFSRIENPKQDFLNFNFNYSKNFFLSEPRLPSFRFVDFIGIENYFKKISDILEFYINHTNNYKNPSVPHKNVIILSGPSGTGKTLFTNALAGEIGINLIDVKIEEFSSLKSKKILYEFKKYIKFRKCLLLIDNIDHFFDEDNFNSPNKKYQNLLSSLMFLKENFLDNHLLFIILENSKNIKTMLKKFDFSFNEIEFKIPSVDIRFQMIRNYSKKFFLNGDDDIFFLTRRTNGLVCKDIINVFIKASEHSYYRKTKRVLGGFYRKPRKDIIPILKELRPMDIDYAFDFFNYNFDKITTHNFSDVTWSEIGGLENTKKVISKFIIEPILYNNHIGSNFGQGNGILINGPPGCGKTMIAKAAAKESGANFSYIKGPEILDKFLGESEKAIRKIFLNAKENSPTIIFFDEFDSLALKRDSFHGDSNSGERIVNQLLSEIDNFNRKSKIFLIAATNRLDIIDKAFLRPGRFDHVLNVNYPSYREKISIFKTTIRKVEVLPGINSKLISYFFLRINFTGADISWIIKKATVQSKDDRIFYCQPFTSNKGLFINRNSKISLKNLVTDYVK

SEQ ID NO: 23256 - protein, 699 aa, Aeropyrum pernix
MKELGVEPGDVVEIEGKKKTVAIVMPAYPEDMGLDIIRMDGILRRNADVNIGEKVIVRKTSVRTATKVKLAPVSYTMTVDEGFKRYVKKKLQGVPITEGDVVVVPVIGQAVQLQVVDARPKGAVIVSEETIVDVLEKPVAQSRVPKVTYEDIGGLKEVIEKVREMVELPLRHPEIFKRLGIEPPKGILLYGPPGTGKTLLAKAVANEADAYFISINGPEIMSKYYGESEQRLREIFEEAKKNAPSIIFIDEIDAIAPKRDEVVGEVERRVVAQLLALMDGLEARGNVIVIAATNRPNAIDPALRRPGRFDREIEVPLPDKHGRLEILQIHTRHMPLAEDMDLEKLAEMTKGFTGADLAALAREAAMYALRRYLPEIDLDQESIPVEVLEKMVVTMEDFLKALREITPSGLREIQIEVPEVRWSDIGGLEDVKQELREVVEWPLKHPEAFTRMGIRPPRGVLLFGPPGTGKTLLAKAVATESGANFIAVRGPEILSKWVGESERAIREIFAKARQHAPAVVFFDEIDAIAPVRGTDVGTRVTERIVSQLLTEIDGVSDLHDVVVIAATNRPDMVDPALMRPGRLEKMIYVPPPDFSSRLEILRIHTRKVPLAEDVDLAEIARRTEGYTGADIEALVREASLAALREDINAAEVSMRHFEVALKKVKPSVTPQMVEYYKRWLETVKQRQEEVKREAPTITL

SEQ ID NO: 23257 - protein, 726 aa, Aeropyrum pernix
MANSSVELRVSEAYPRDVGRKIVRIDRQTAARLGVEVGDFVKVSKGDRSVVAVVWPLRPDDEGRGIIRMDGYLRAALGVTVGDTVTVEKAEKVEPASKVVLAPTEPIRFGRDFVEYVKEFLLRKPISRGETIIVPVLEGLPLVVVSTQPAHFVYVTEATEVEIREKPVREEIERLRGVPKVTWEDIGDLEEAKERIREIVELPMKHPEIFKHLGIEPPKGILLYGPPGTGKTLLAKALANEIGAYFISINGPEIMSKYYGESEQRLREIFKEAEENAPSIIFIDEIDAIAPKREEVTGEVEKRVVAQLLTLMDGLKERGRVIVIGATNRPDAIDPALRRPGRFDREIEIRPPDKRARAEILKVHTRNMPLAEDVDLDKLAEMTHGYTGADLAALAKEAAMAALRRFIREGKINFEAKEIPATVLKELKVTMKDFMEAMKMIRPTLIREIYVEVPEVRWSDIGGLEEAKQALREAVEWPLKHPEIFEKMGIRPPRGVLLFGPPGTGKTLLAKAVATESGANFIAVRGPEILSKWVGESERAIRKIFERARQAAPAVVFFDEIDAIAPARGARFDTSGVTDRIVNQMLAEMDGIQPLSNVVVIGATNRPDILDPALLRPGRFDRLIYVPPPDKEARKEIFKIHTKKVPLGEDVDLEKLAEMTEGYTGADIEAVVREAVMAKLREKLEVGKVEMRHFLEALKKVPPSLTKEDILRYERLAKELKKLTLG

SEQ ID NO: 23258 - protein, 780 aa, Trypanosoma brucei
MSAKAQQVKQQKLNRLIADDLAEDDNSVVVLNAKRMDELSIFRGDTVKLKGKKNRSTICIAMSDENCPEGSIMVNKVTRRNIRILLGDLITVSSHSNVPYGNHVHVLPIDDTVKNLTGDLFETFLKPYFLEAYRPVKTGDLFICRGAMRSVEFKVVEVDPGDCCIVAPETVVHCEGDPIRREDEERLDDVGYDDIGGCRRQLVQIREMVELPIRHPELFKSIGIKPPRGILMYGPPGSGKTLIARAVANETGAFFFLINGPEIMSKMAGESEGNLRNAFVESEKNAPAIIFIDEIDSIAPKREKAQGEVEKRIVSQLLTLMDGLKGRSQVIVMAATNRPNAIDPALRRFGRFDREIDIGVPDEIGRLEILRIHTKNMKLDPNVDVEKIAKDSHGYVGADLAQLCTEAAMQCVREKMAVVDWDDETIDAEVLDSMSVTNNHFLDALSKMNPSALRETQVETPNVTWSDVGGLLDVKRELQELVQYPVEFPWKFEKYGISAPKGVLFYGPPGCGKTLLAKAIATECQANFISIKGPELLTMWFGESEANVRDVFDKARAAAPCVLFFDELDSVARSRGHSGDGGASDRVINQILTEMDGMNSKKNVFIIGATNRPDVLDPAVMRPGRLDQLIYIPLPDKASRVAILKASFRKSPLAPDVDLDQLAAATHGFSGADLAGICQRACKLAIRESIAKEIQLEEARANGVLNEDQDIDPVPQITRLHVEEAMRGARRSVSDADIRKYELFATSLQQSRAFGNVSLDPGNQGGAGGDAGAGDDDLYS

SEQ ID NO: 23259 - protein, 1229 aa, Plasmodium falciparum
MKVRKMHYPLFSFTEYLSCYIILYFFVFLPNYSYAININNYHNKNNLWNINNKWNNQQSNHFSNNRIGHFLWGSKIRKNPLASISTSITTKKLENQKKKTNKNESYSNVNDKYEHNNNTAHFVQINYKNDQSNDTLSTYKNNNEMTVEGKPNNLASGEGKKEIHNTTQKILEKVDYFKEREKITNSYNNNNNNNKVIVTHDNKNHTNYINKVENKQSDDKIKNLNNKYIKKFKSHILQNDILGTISTMFWSGKKNNNGNVKKGIKNVPMDEKSYSPNDHDNNSNNSNNNNNNDNNNSNNNNNNNNGGKNNSYYNEKTQKGVNDKETNFLLKALDSGKFPTYCLVENIDENLDNFDIYMSKEKMDELNINDGATVLLKGKKKREMLGIARLDRSLKKHYVVISFAMKKNLRLMHNDIIKIHPFMNAKRIRNVVLSPFSDTIPNLSREELEKAVIHPYLKNSYKPLRVNSNIYIYYKNNKIEFKVLKIISEESENEEFGCIGEHSQLTLAEEYLKREDYEENNDDITYEDLGGMKKQLNKIRELIELPLKYPEIFMSIGISAPKGVLMHGIPGTGKTSIAKAIANESNAYCYIINGPEIMSKHIGESEQKLRKIFKKASEKTPCIIFIDEIDSIANKRSKSNNELEKRVVSQLLTLMDGLKKNNNVLVLAATNRPNSIDPALRRFGRFDREIEIPVPDEQGRYEILLTKTKKMKLDPDVNLRKIAKECHGYVGADLAQLCFEAAIQCIKEHIHFLDLDEEDFIEFMKISVDEDKKNMGNEPYGSSHTNNSNYINHLTESSNKLSYTNMFPLNRKNTLLQNDKNEMNKDSSYDKKTDALDNYKNDSTIDMEKKKNKKKSNFFFSNDDEETKNKNKTNVNQKKKKNPNDKLDKNERRIPAYILNKLTIKAKHFQHALNICNPSSLRERQVQIPTVTWNDIGGMNEVKEQLKETILYPLEYKHLYNKFNSNYNKGILLYGPPGCGKTLLAKAIANECKANFISVKGPELLTMWFGESEANVRDLFDKARAASPCIIFFDEIDSLAKERNSNTNNDASDRVINQILTEIDGINEKKTIFIIAATNRPDILDKALTRPGRLDKLIYISLPDLKSRYSIFKAILKNTPLNEDVDIHDMAKRTEGFSGADITNLCQSAVNEAIKETIHLLNIRKKEQEEQRKKNKNSFKIDDTDTYDPVPTLSKKHFDLAFKNARISIQPEDVLKYEKFKEKLSLQDF

SEQ ID NO: 23260 - protein, 709 aa, Plasmodium falciparum
KKKREMLGIARLDRSLKKHYVVISFAMKKNLRLMHNDIIKIHPFMNAKRIRNVVLSPFSDTIPNLSREELEKAVIHPYLKNSYKPLRVNSNIYIYYKNNKIEFKVLKIISEESENEEFGCIGEHSQLTLAEEYLKREDYEENNDDITYEDLGGMKKQLNKIRELIELPLKYPEIFMSIGISAPKGVLMHGIPGTGKTSIAKAIANESNAYCYIINGPEIMSKHIGESEQKLRKIFKKASEKTPCIIFIDEIDSIANKRSKSNNELEKRVVSQLLTLMDGLKKNNNVLVLAATNRPNSIDPALRRFGRFDREIEIPVPDEQGRYEILLTKTKKMKLDPDVNLRKIAKECHGYVGADLAQLCFEAAIQCIKEHIHFLDLDEEDFIEFMKISVDEDKKNMGNEPYGSSHTNNSNYINHLTESSNKLSYTNMFPLNRKNTLLQNDKNEMNKDSSYDKKTNALDNYKNDSTIDMEKKKNKKKSNFFFSNDDEETKNKNKTNVNQKKKKNPNDKLDKNERRIPAYILNKLTIKAKHFQHALNICNPSSLRERQVQIPTVTWNDIGGMNEVKEQLKETILYPLEYKHLYNKFNSNYNKGILLYGPPGCGKTLLAKAIANECKANFISVKGPELLTMWFGESEANVRDLFDKARAASPCIIFFDEIDSLAKERNSNTNNDASDRVINQILTEIDGINEKKTIFIIAATNRPDILDKA

SEQ ID NO: 23261 - protein, 1224 aa, Plasmodium falciparum
MFVDSLKKRIYHIIVKKNFIRKDENKENNLKNVLSNCSVIESLLRKEFQEYRRSPKNKLYGLIMNIIKKSLFVNYDKFMIKYINKKKKKKMKLNNNCQVNNNNNNNNNNFIYDTNHIISNDITTCDIIEGDNCRSTILNDNNEIINYTNKNEYNQNNIEDEKMNEQNIHGHDPNDVLLNEKDLNVGNEFIKNNMLKNKKKLKIIEGKLKDEKNVQSHLTNNQINENMNHMKQEHNKSSFNNSNKIINSIISNKTLNDFKGIKNIKKDILYSIIYPYKFRLSNLNCIINIFGTSGTGKTTLSYAIAGECGCPFFYIKLPEYIKYISNDNKNNKLRILFEHIKNEYDKAILCIDDIDIIFSSKDDSTDLYLFTYLLNIFHNSNIIVLLLSINKPNDSILYSKIQKFITIPIPTYDDRIEILEQASCEYFLSFDIPYTASITYGFNRGQIFDIMNESLNLYIYNELLRKDLKINHMIKNEVDHVTQTCENINKINCNENIMVHQKSHHISNKINNDNNDNNDNNNDNNNNNNNNNNNNNNASVWGYTKSDNDFFKNVTNYEEIKQNDQLTSHEQNILITSIKTNDENQIASTEIPQELSNDSPCLNNQNNHNLKEINHKRKYNMLLCSLNEEKVIEGKAEKKIQKTIEINNDIIFEGVNNIKKKMTNENICEVPNINLDNIGSLKKIKKILESKFILPVKYSNIYKHLGINKSMGILLYGPPGCGKTMLAKAISNEMKANFIAIKGPEILNKYVGESEKKVREIFSYASVYKPCLIFFDEIDSICINRSNNKSVSASDRVVNQLLSEMDGLSQREGVYIIATTNRPDIIDKALLRSGRFDQLIYISLPKYQGRVDILKKLSKNMPIDKNVRFEEISKLTRGYSGADLYGVLRESAFIALQECRDKIDIQNKSNPKNNNIYNNTDQQMNKDTNVINIMNQHLSIQENNSIKQHSTIFSTSNINNNNVDHIYSIHNFDHIKSNSYRTNKTVSQDMNNSIDDNTKPYILDDSVDNNRVLSKGQNNINQMDQINLDEIVKISENFTNEYKSNNVNTYKLSNNNIMDIQRLDININHNNSNNLNYNKMNDEISSSNNKNKDISFNDHQNMFSTNNFGKNKNMIKLEYNNNMEEEQRDYNNSSQNCILSTNNNHLNEKDRNNLIYEYIQKNKNILTITQKHIIQAIKIIPRSVTKEQIKYYKEIFLLYYSYIFLIFYIFKNYYLIYKIFFFFM

SEQ ID NO: 23262 - protein, 751 aa, Paramecium tetraurelia
MIPAKAFQLLPVALNKTEEAFTGFLYTSKNTHAQLKQRYNVQGDLFIQINGYVFQLQGENGYKDDSIAGSKYVRQLLRMSFTDKIDVAVFSLPKDKEYRLGVLDVELDIVQQSGTLDRLELNSEDLAPFLKRAYSGQFFRAGQIQLFLFEGNTYLFKVTRTDVLSVGVESQQVKFMGGGMLVDETEVEFSIRQGVNQLKMKNASTHTASIFREDFSFDKLGVGGLDKELANIFRRAFSSRRFPQAFLEKYGIKHIKGLLLYGPPGTGKTLIARQLAKVLKAKPPKIVNGPEIFSKFVGEAEENVRKLFAEAIADQETKGDQSDLHIIVFDEMDAICKQRGSINSGSGAYDNVVNQLLSMIDGVNSLNNILVIGMTNRKDLIDEAVLRPGRFEVHIEVGLPDEQGRQQILNIHTDNLKKNNALDKDVNLEELAQITKNYTGAEIEAVVKSASSFAFQRMQSIFDFQKKLTKQDELQVRRCDFMNALDEVKPQFGIDTNKFDLLLKNRLIDFGEEFRKLQKILKNTIDQTRFGKNSQLNSVLLEGEQGSGKTSVAAWLAVECGFPYVKLISPETFIGLTEGAIINQMVRIFNDAYKSSLSCILIDNIERLIEYVDIGPRFSNAILQALLVLIKRLPDKSQCRLLIIGTTSQYQIMKQLEVVSCFNVAFKVPNLIKPDEINLVIKDYLTTSPQSSNKIQLSQQQEQSVNTIATQIKDIPIKRLLMLLDMVGAQEKGLNVEEFMICYTTVMMNHL

SEQ ID NO: 23263 - protein, 751 aa, Paramecium tetraurelia
MISAKAFQLLPVALNKTEEAFSGFLYTSKNTFTQLKQKYNVQGDLFIQINGYVFQLQGENGYKDDSIAGSKYVRQLLRMSFTDKIEAAVFALPKDKEYRLGVLDIELDIVQQQGSLDRIEMNSEDLAPFLKRAYSGQFFRAGQIQLFLYEGNTYLFKVTRTDVLSVGVDSQQVKFMGGGMLVDETELEFSIRQGVNQLKMKNASTHTASIFREDFSFDKLGVGGLDKELANIFRRAFSSRRFPQAFLEKYGIKHIKGLLLYGPPGTGKTLIARQLAKVLKAKPPKIVNGPEIFSKFVGEAEENVRKLFAEAIADQETKGDQSDLHIIVFDEMDAICKQRGSINSGSGAYDNVVNQLLSMIDGVNSLNNILVIGMTNRKDLIDEAVLRPGRFEVHIEVGLPDEGGRQQILNIHTENLRKNEALDYDVNLEELAQITKNYTGAEIEAVVKSASSFAFQRMQNIFDFQKKLNKQDELKVKRSDFMNALDEVKPQFGIDSNKFDLLLKSRLIDFGDEFKKLQKILKNTIDQTRFGKNSQLNSVLLEGDQGSGKTSVAAWLAVECGFPYVKLISPETFIGLTEGAIINQMVRIFNDAYKSSLSCILIDNIERLIEYVDIGPRFSNAILQALLVLIKRLPDKSQCRLLIIGTTSQYHIMKQLEVVSCFNVSFKVPNLIKPDEIKLVITDYLTTSPQSQNKLQLTQQQEQQVNIIASQIKNIPIKRLLTLLDMVGAQEKGLNIDEFMICYTTVIMNHL

SEQ ID NO: 23264 - protein, 780 aa, Encephalitozoon cuniculi
MAAAANEKDFSTAILESKTKNTLIVCDKDCSKLRTYQVGLHPTTLNELELFESDYVRILGKKKAELIFSTVALESVPPRHIAIVRDGRFNLRIRITDTVKLYRVDKDIPVVSKLNFLPIKDTVENIRGNIFDEFVRPFLDFNFMPLTTGSIYGVTSGLGRVEFKVTKMIDAQDMEIKHGSVTSTTSVYCDETISREEVEKEFNMVGYDDVGGCRAQMAKIRELVELPLRHSQLYSKIGVKPPKGILLYGPPGTGKTLIARAIANETGAFLFLINGPEIMSKMAGESESNLRKAFEEAEKNSPAIIFIDEIDALAPKREKSQGEVERRIVSQLLTLMDGMKARSNVIVLGATNRPNSIDPALRRYGRFDREIEIGVPDETGRLEILRIHTKNMKMSEDVDLVAINKELHGFTGSDLASLCSEAALQQIREKLPQIDLDSEKIDAKVLASLKVNSENFRYAIEHTDPSSLRETVIQSPNVKWSDIGGLEQVKQELRETVQYPVEYPEKFIKFGMTPAKGVLFYGPPGCGKTLLAKAVATECKANFISIKGPELLSMWVGESESNIRDLFARARGAAPCVLFFDEIDSIAKARSGNDGSSGATDRMLNQLLSEMDGINQKKNVFVIGATNRPDQLDSALMRPGRLDQLVYIPLPDLDSRVSILQATLKKTPLSPEIDLRQLAEATDKFSGADLSEICQRACKLAIRETIEYELEQKKKGSEMMDLEDPVPYLRPDHLVQSLKTARRSVSEKEVERYEAFARSMKVDVRKFDKKNDINDDGLYE

SEQ ID NO: 23265 - protein, 506 aa, Encephalitozoon cuniculi
MNRKNLVRDAGSALRDKYITSHLNESLKIDREYPPLHSVGGIKYLLPKITELVYNPLFAKASYDEIGIHPPSTLLLHGVSGVGKTFLVNCISQEYKLPIVKACMDSDKELRESFRKSSLLERSIILIEDIDALGEDDRKVISQLSEYLENHKGKSIVISTARNPALIHESLNKFDNSLLVKIPTTDERRDILARLAEKMKCQGVDWTDLAKLMPGFVARDLKRTLKIASTKAVMDGSPVVRMADFEAALREIRWKGTDITFDSIGSLEDVKDELNMSIVFPSRFPEKFHKLGITRPSGILLYGPPGCGKTLLVRAVSNMSHCNFLSIKGPELISKYVGDSEKEIRKLFDKAKQLQPCVLFFDEIDSLCGERSGNEFTGRIVNQILTLLDGLEDRGDVYVIGATNRIESIDKAILRPGRFDKILRVPLPSRKGCIDIFRKCAEGVPIEPFDFEELELEGFSGAEIAGLIRDAATLCLKQNFDADSLVITKENIIEALQTARVTKDFR

SEQ ID NO: 23266 - protein, 308 aa, Schistosoma japonicum
MVELPLRHPQLFKAIGVKPPRGILLYGPPGTGKTLVARAVANESGSFFFLINGPEIMSKLAGESESNLRKAFEEAEKNAPAIIFIDELDAIAPKREKTHGEVERRIVSQLLTLMDGLKQRSHVIVMAATNRPNSVDPALRRFGRFDREIEIGIPDSIGRLEILRIHTKNVRLAKDVDLVQIANEAHGHVGADLASLCSEAALQQIRNKMDLIDLEDDTIDAEVLNSLAVTMDDFRWALGKSNPSALRETTVEVPNVTWDDIGGLENVKRELQELVQYPVEHPDKFLKFGMTPSKGVCFTVLQVAVRRC

SEQ ID NO: 23267 - protein, 810 aa, Caenorhabditis elegans
MASVPTQRDEKEKKNDELATAILKDKKRPNRLIIDQSDNDDNSMVMLSQAKMDELGLFRGDSVILKGKKRRETVSIVLNADNCPNDKIKMNKVVRNNLRSRLGDVVSISSAQLEYGKRVHVLPIDDTIEGLTGNLFDVFLRPYFTDAYRPVHKGDIFTVQAAMRTVEFKVVETDPAPACIVAPDTVIHYEGDPIKREEEEEALNEVGYDDLGGVRKQLAQIKEMVELPLRHPQLFKAIGVKPPRGILLFGPPGTGKTLIARAVANETGAFFFLINGPEIMSKMSGESESNLRKAFAECEKNSPAILFIDEIDAIAPKREKAHGEVEKRIVSQLLTLMDGLKTRAHVVVIAATNRPNSIDGALRRFGRFDREIDIGIPDAVGRLEILRIHTKNMKLGEDVDLEQVANECHGFVGADLASLCSEAAIQQIREKMELIDLEDDTIDAEVLNSLAVTMENFRFAMGKSSPSALREAVVETPNTTWSDIGGLQNVKRELQELVQYPVEHPEKYLKFGMQPSRGVLFYGPPGCGKTLLAKAIANECQANFISIKGPELLTMWFGESEANVRDVFDKARAAAPCVLFFDELDSIAKARGGSVGDAGGAADRVINQVLTEMDGMNAKKNVFIIGATNRPDIIDPAVLRPGRLDQLIYIPLPDEASRLQIFKASLRKTPLSADLDLNFLAKNTVGFSGADLTEICQRACKLAIRESIEREIRQEKERQDRSARGEELMEDELADPVPEITRAHFEEAMKFARRSVTDNDIRKYEMFAQTLQQSRGFGNNFKFPGEAPSAGQPVGGNGGSGGNDDDDLYN

SEQ ID NO: 23268 - protein, 809 aa, Caenorhabditis elegans
MASVPTHQSEKEKKNDELSTAILKDKVKPNRLIVDQSEQDDNSVIAVSQAKMDELGLFRGDAVILKGKKRKESVAIIVSDESCPNEKVRMNRVVRNNLRIRLGDVVSITPAPNLSYGTRIHVLPIDDTIEGLTGNLFDVFLKPYFLEAYRPLHKGDIFTVQAAMRTVEFKVVETEPAPACIVSPDTMIHYEGDPIKREEEEESMNDIGYDDLGGVRKQLAQIKEMVELPLRHPQLFKAIGIKPPRGILLFGPPGTGKTLIARAVANETGSFFFLINGPEVMSKMSGESESNLRKAFEECEKNQPAILFIDEIDAIAPKREKTNGEVERRIVSQLLTLMDGVKGRSNLVVIAATNRPNSIDGALRRFGRFDREIDIGIPDAVGRLEILRIHTKNMKLADDVDLEQIANECHGFVGADLASLCSEAALQQIREKMELIDLEDDQIDAEVLNSLAVTMENFRFAQGKSSPSALREAVVETPNTTWSDIGGLQNVKRELQELVQYPVEHPEKYLKFGMQPSRGVLFYGPPGCGKTLLAKAIANECQANFISIKGPELLTMWFGESEANVRDVFDKARAAAPCVLFFDELDSIAKARGGGAGGDGGGASDRVINQVLTEMDGMNAKKNVFIIGATNRPDIIDPAVLRPGRLDQLIYIPLPDEASRHQILKASLRKTPLSKDLDLTFLAKNTVGFSGADLTEICQRACKLAIRESIEKEIRIEKERQDRQARGEELMEDDAVDPVPEITRAHFEEAMKFARRSVTDNDIRKYEMFAQTLQQSRGFGNNFKFPGEQRGSDAPSAPVPAQDDDDLYN

SEQ ID NO: 23269 - protein, 856 aa, Caenorhabditis elegans
MVREALERIQLVAKEENDEKMEEKEAMDDVQEIPIVKALETRKRKAPAAGRKSTGYGSGEIPTFGAQNSEKIASKLEIWVNFSEFFGLIVDYQGKFQFLVAKRTENSLNCIFFRKIRRKSLTKKQSTLESEKFKKDYGSSVFSCVNVEFLTARDQAAAAKEVVLSDDSEDERAARQLEKQIESLKTNRANKTVLNLYTKKSAPSTPVSTPKNQATKKPPGASAAPPALPRGLGAVSDTISPRESHVKFEHIGGADRQFLEVCRLAMHLKRPKTFATLGVDPPRGFIVHGPPGCGKTMFAQAVAGELAIPMLQLAATELVSGVSGETEEKIRRLFDTAKQNSPCILILDDIDAIAPRRETAQREMERRVVSQLCSSLDELVLPPREKPLKDQLTFGDDGSVAIIGDSPTAAGAGVLVIGTTSRPDAVDGGLRRAGRFENEISLGIPDETAREKILEKICKVNLAGDVTLKQIAKLTPGYVGADLQALIREAAKVAIDRVFDTIVVKNEGHKNLTVEQIKEELDRVLAWLQGDDDPSALSELNGGLQISFEDFERALSTIQPAAKREGFATVPDVSWDDIGALVEVRKQLEWSILYPIKRADDFAALGIDCRPQGILLCGPPGCGKTLLAKAVANETGMNFISVKGPELLNMYVGESERAVRTVFQRARDSQPCVIFFDEIDALVPKRSHGESSGGARLVNQLLTEMDGVEGRQKVFLIGATNRPDIVDAAILRPGRLDKILFVDFPSVEDRVDILRKSTKNGTRPMLGEDIDFHEIAQLPELAGFTGADLAALIHESSLLALQARVLENDESVKGVGMRHFREAASRIRPSVTEADRKKYEHMKKIYGLKQATPPSV

SEQ ID NO: 23270 - protein, 813 aa, Caenorhabditis elegans
MPGGMGFPSDPALLPRVQAHIRKFPGTKYFKPELVAYDLQQEHPEYQRKNHKVFMGMVREALERIQLVAKEENDEKMEEKEAMDDVQEIPIVKALETRKRKAPAAGRKSTGQAAAAKEVVLSDDSEDERAARQLEKQIESLKTNRANKTVLNLYTKKSAPSTPVSTPKNQATKKPPGASAAPPALPRGLGAVSDTISPRESHVKFEHIGGADRQFLEVCRLAMHLKRPKTFATLGVDPPRGFIVHGPPGCGKTMFAQAVAGELAIPMLQLAATELVSGVSGETEEKIRRLFDTAKQNSPCILILDDIDAIAPRRETAQREMERRVVSQLCSSLDELVLPPREKPLKDQLTFGDDGSVAIIGDSPTAAGAGVLVIGTTSRPDAVDGGLRRAGRFENEISLGIPDETAREKILEKICKVNLAGDVTLKQIAKLTPGYVGADLQALIREAAKVAIDRVFDTIVVKNEGHKNLTVEQIKEELDRVLAWLQGDDDPSALSELNGGLQISFEDFERALSTIQPAAKREGFATVPDVSWDDIGALVEVRKQLEWSILYPIKRADDFAALGIDCRPQGILLCGPPGCGKTLLAKAVANETGMNFISVKGPELLNMYVGESERAVRTVFQRARDSQPCVIFFDEIDALVPKRSHGESSGGARLVNQLLTEMDGVEGRQKVFLIGATNRPDIVDAAILRPGRLDKILFVDFPSVEDRVDILRKSTKNGTRPMLGEDIDFHEIAQLPELAGFTGADLAALIHESSLLALQARVLENDESVKGVGMRHFREAASRIRPSVTEADRKKYEHMKKIYGLKQATPPSV

SEQ ID NO: 23271 - protein, 813 aa, Caenorhabditis elegans
MPGGMGFPSDPALLPRVQAHIRKFPGTKYFKPELVAYDLQQEHPEYQRKNHKVFMGMVREALERIQLVAKEENDEKMEEKEAMDDVQEIPIVKALETRKRKAPAAGRKSTGQAAAAKEVVLSDDSEDERAARQLEKQIESLKTNRANKTVLNLYTKKSAPSTPVSTPKNQATKKPPGASAAPPALPRGLGAVSDTISPRESHVKFEHIGGADRQFLEVCRLAMHLKRPKTFATLGVDPPRGFIVHGPPGCGKTMFAQAVAGELAIPMLQLAATELVSGVSGETEEKIRRLFDTAKQNSPCILILDDIDAIAPRRETAQREMERRVVSQLCSSLDELVLPPREKPLKDQLTFGDDGSVAIIGDSPTAAGAGVLVIGTTSRPDAVDGRLRRTGRFQNEISLGIPDETAREKILEKICKVNLAGDVTLKQIAKLTPGYVGADLQALIREAAKVAIDRVFDTIVVKNEGHKNLTVEQIKEELDRVLAWLQGDDDPSALSELNGGLQISFEDFERALSTIQPAAKREGFATVPDVSWDDIGALVEVRKQLEWSILYPIKRADDFAALGIDCRPQGILLCGPPGCGKTLLAKAVANETGMNFFSVKGPELLNMYVGESERAVRTVFQRARDSQPCVIFFDEIDALVPKRSHGESSGGARLVNQLLTEMDGVEGRQKVFLIGATNRPDIVDAAILRPGRLDKILFVDFPSVEDRVDILRKSTKNGTRPMLGEDIDFHEIAQLPELAGFTGADLAVFIHELSLLALQARVLENDESVKGVGMRHFREAASRIRPSVTEADRKKYEHMKKIYGLKQATPPSV

SEQ ID NO: 23272 - protein, 724 aa, Caenorhabditis elegans
MSSAKKKPSLVTCPQCNAVVLTKDSLRHQDFCGKPVVESEIACAQNGTLRGFNVAVDKAEGFLPPDAVGWEKEHSILINQQTMESLGLLARQPVRIIHSSDSFIGIVWPCKEVALLKVSIISSRIARERMITLESCGRVEKLKSLSVTVKTSLTLNPALSGFLEAYLSHSYLQYNSSVDLKYLGQNVTVTPEEPIESKMSAMGIDDDKKRNSKVVSTAVGYKIQILNASAEGSTSDVLQTLPTDLSNIGGCFTAKQVLEDYVISPVRQKESPCSVLIWGLPGSGKTLLLKEVALVLSGSTTYIGSCEELMELNGVTTGNIVIVDVNELEKENTKANRALSFLLGDEKKCVILCVRSSETLDIGFRVRFPIEAEITVPTQDERLDILSKIGNIYNFPLELHLDVARHTHGFTGGDLCSLLKAAKFARGRTHLERVNDARKRIRPTGIRQFILEVPNVSWNDIGGNEELKLEIQQAVIWPQKHPEAFERFGIDPPAGILLYGPPGCSKTLIARALASEAKMNFLAVKGPELFSKWVGDSEKAIRDLFSRARQVAPTIVFFDEIDAVGSSRGSEKSSGVSDRVLAQLLTELDGLEKSSRVILLAATNRPDQLDSALLRPGRLDRAIYVGLPCEVTRRAILEMRTKKMKFDDTVRTIDKLVEKTSGYSGAELVAVCRTAAMFAMRESIDATIVQWTHFEQALAAVVSRTEAYLLEIYDDFKAGRASNA

SEQ ID NO: 23273 - protein, 720 aa, Caenorhabditis elegans
MVCREEFFKFYFRILFSKNEAKRIRKLLWNEEVELKIVVDQSGASINTLSIHPVTCWSLGILDSQLVKTSFTITTDHGKSSNIERVMKVQTSTSVKIGSLRISRCDVFNLFGPDLVKNVAVDNITPNFKFHETPIPISEDAKLSLMRQPSVAKNIRLEKHHLKQILKSANVFYKNDVIRITNYNAYTDKTTHLFYKLDVSSSPCIMDSSTAVYETSAVSQSLPFSNFLLKNSLTSSMRTTVFRMTQIYSAQKTISKKALVLLVTGASGSGKRLMSRVFASETHRNFFEVDGYEMVCENASTSEAKWTSWWEKAKLLQNCVLFIRNSNVLAIDQFNALDRRILQYMEQKLSEPSKITVIFSCNTDTMSSMPANVKNLALYTFSAEFMDENDRKTWLQYYLNEKLANHVAKKTSGFTLAELEKLVKNGKKVKIEEKEEKVYEDLIDKRNSNFADAIGAPKIPNVRWEDVGGLEETKQTVLESIRTNLFGSRALKRSGIILYGSPGCGKTLIAKAVATEFKIAFLSVKGPELLNKYVGQSEENLRKVFERAKQASPCVIFFDEIDSLAPNRGRNGDSGGVIDRIVSQLLAELDKLHNSPLTKVFVMGATNRPDLLDNSLMTPGRFDKLVEVKPGEDVESKTKILEAVSRKMRFEEDVDLREIASKVDEKMSGAQLFSIISNAGMAAIVETIQSIEDGKTENQSIRVAQRHLLESVKRFHETKY

SEQ ID NO: 23274 - protein, 996 aa, Caenorhabditis elegans
MNQSYPAFVSFHSLSNCFAYAKLLTAINNANDLSSANEKFGGPLLGNFRMKSCDNPNIYCDIQVFGQFPFTNVFINSVFAEVSGFHEKQEVILEKMESKTYCSHIEVAPRTEDDYSVIAQSQSSIENEFLNQIRLVSQNMIIPHFLSPGVYVQFRILNIVPASNKPVMLNNDTELHVQTVTEGSQNDEKATMAQKVSNIVQDLSMQGFLSNYVINLEKTPIIGRVLPKKTVELWVKSGLEKLDKSTIYIPGKESCLYSEHGIVEIRSQGRGENEERFQFFYLHRSPNIYLRNQSNELDASLSHMFESLQLENRCHCVEGTNTLEPYMNIKIFGVTQNRICTLRYCEIMMEKETFQWVKEFELTNVLTKSLHSELQGNPILLSVEGKELDVAVDDKAIRLKVVPSMKGLVKRVTENTCFLFDLTTELIFQQLGDLKQKHGDTENTRRRRKRTEEAEASEQIPQKPETSTMENFGFAQNKHFVQIGSHSKLLSELDKVCCGGKQHVMVLGGNGSGKTTFIKKLARRLSHNSSVTFCKMVPCALLKGRSADIIEKLLSDTLHEMEVKKPSCLFLDDFDVILPQIDQEQRHLAMEKVVSVFAQKLRTTEVSVVLVAQRLSSLNDGFVEQVMRARPIVSRKIELEQLTKEDRCEIFETFLDLPENSDIISEIVKKSDGYTFSEIEKLAVSINVECAIKGVKYITEIEVEKAFECFVAGKMGKIEDGQVLPTMEDVGGMFEQKKLLEQVIIWPRKYPQLFESVGVPVSKGILLHGPSGCGKTLLANATISNSNFSVVNVKGPELLSKYIGASEENVRLVFEKARSCAPCILFFDELDSLAPKRGHDSTGVTDRVVNQLLTELDGAEGGMKGVIILGCTSRIDLIDDALLRPGRFDHHVYCGHPEKTERLDIMKVLTNKLKPTDVDFECLAQKTDGWSGADLQLLFTNAQFYNARQIAKEEDGLEEDNVPIDQASIESVFNDSIPKPKRSQVDNRIGQKVTLA

SEQ ID NO: 23275 - protein, 607 aa, Nostoc punctiforme
MDDIFKGFEHLLEIAKALEEKVEKGELKTSIQIRSHNLSSIPRQGNIPRTSNSSRVRSNSTVGTTPMDDTDVTPPSARTNSKAAWQGIGGLADVLQEIRELVEIPLKRPDLLVKLGLEPPRGVLLVGPPGTGKTLTARVLAEELELNYIAINGPEVMSKYYGEAEARLRSIFEKATRSAPCLIFIDEIDSLAPDRSQVEGEVEKRLVAQLLGLMDGFAKTEGVLVLAATNRPDYLDPALRRPGRFDREVQFRVPDRDGRLEILTILTSAMPLETSVNLGAIADLAVGFVGADIKALCQKAAYIALRRQVPSLNSPVPENMTIVQQDFLEAIKEIKPSVLRDVAIEVPSVSWDDIGGLDDVKQKLQESVEGALLYPELYEQTKAKPPRGILLWGSPGTGKTLLAKAIASQARANFIAVNGPELLSRWVGAAEQAVRELFRKARQAAPCVVFIDEIDTLAPARGRFTGDSGVSDRVVGQLLTELDGLHECPKVLLVGATNRPEALDPALLRAGRLDLQIKIDLPDRASRLAILRVHNLDRPLVDVDLETWATVTEGWNGADLALLSNQAALSAIRRYRAQGLTDSSLIQITNDDFQVTYQMLANQHQSQ

SEQ ID NO: 23276 - protein, 737 aa, Halobacterium sp. NRC-1
MRLTVKQLKNRDPGSGMAVIDRDALQEIGVSSGDFVAIEGRNGGRTVARVWPSNTSDAGRGIIRIDGQLRQAANVSIDDRVEVEKTEVEPADRVTVSLPQNLQIRGDLGSHLREHLVDQAVRAGQTVAFPIGFGMFSGRSGRRIPLRVVDTQPSGTVVVQNTTEIEIADQSAQEVSVESGEPENTTAPALTYEDIGGLDDELEQVREMIELPMRHPELFGTLGIEPPKGVLLHGPPGTGKTLIAKAVANEIDAHFQTISGPEIMSKYYGESEEQLRDVFEEAEENAPAIVFIDELDSIAPKREDVSGDVERRVVAQLLSLMDGLEERGQLTVIGTTNRVDAVDPALRRPGRFDREIEIGVPDHDGREKILQIHTRGMPLGDGVDLDRYAENTQGFVGADLENLVKESAMHALRRIRPDLDLDEEEIPADILDSIEVTENDFKEALRGIEPSALREVFVEVPDVTWDHVGGLDDAKERLQETVQWPLEHADAYEQVALEPAKGVLLYGPPGTGKTLLAKAVANEANSNFISIKGPELFNKYVGESERGVREVFSKARENAPTVVFFDEIDAIASERGQGVGDSNVGERVVSQLLTELDGLEELEDIVVIATTNRPDLIDDALLRPGRLDRHVAVDEPDEAARREIFEIHTEDKPLAEDVDVDELVERTDGYVGADIEAVCREAATVAVREYVRATASAESANVDEIELSIEHFEQALEEVDSNAGSETQAFEKPAEAV

SEQ ID NO: 23277 - protein, 742 aa, Halobacterium sp. NRC-1
MNEVQLEVAKAYPNDSGRGIARLDPDTLLHLKLSPGDIIEIEGAETTAAKVWRADRQDWNTDTIRIDGFTRQNAEVGIGERVKIRKADAEKADTLVLAPPEEASVQFGSDAAGMVKRQILKRPVVARDIVPVMSSTNHPFMRSPGQAIPLIAVETEPEGVCLVTEDTDVELREEPISGFERTGGGITYEDIGGLENEIQRVREMVELPMKHPQIFQKLGIEPPQGVLLHGPPGTGKTLLAKAVANETSASFFSIAGPEIISKYYGESEQQLREIFEDAKDDSPSIIFIDELDSIAPKREDVTGEVERRVVAQLLTMMDGLEGRGQVIVIAATNRVDAVDPALRRPGRFDREIEIGVPDEIGREEILKIHTRGMPLSDDVNLSTLADDTHGFVGADIESLSKEAAMRALRRYLPEIDLDEEDIPPSLIDRMIVKREDFKGALSEVEPSAMREVLVELPKITWDDVGGLTEAKNNVKESVEWPLNQPEKFTRMGVEPPAGVLLYGPPGTGKTLMAKAVANETNANFISVRGPQLLSKWVGESEKAIRQTFRKARQVAPTVIFFDELDSLAPGRGQTGGNNVSERVVNQLLTELDGLEEMEEVMVIAATNRPDIIDPALIRSGRFDRLVQVGQPGIEGREQILKIHTQDTPLAADVSLRELAERADGYVGSDLANIAREAAIEALRDDEDADDVGMAHFRAAMENVRPTITDDLMEYYDQVEDQFKGSQGPNVNSRQGSEHIGFQ

SEQ ID NO: 23278 - protein, 759 aa, Halobacterium sp. NRC-1
MKLTVKPLKQKDAGRGLAAVDRDSMDELALENGDYVVIDGQGDHGRAVARVWPGYPEDDGDGVVRIDGRLRKEADVGIDDQVTVEPADIKPAGGVTVALPQNLRVRGNIAPMVRDRLNGRPVTAGQTIPISFGFGGMSTISGQQIPVKIAETEPSGTVVVSNDTEIQLSERPAEEIAPGAGEAAETGDPTPNVTYEDIGGLDGELEQVREMIELPMRHPELFQQLGIDPPKGVLLHGPPGTGKTLIAKAVANEIDAHFETISGPEIMSKYYGESEEKLREVFDEAEENAPAIVFVDELDSIAPKRGETQGDVERRVVAQLLSLMDGLEDRGDVTVIAATNRVDAIDPALRRGGRFDREIEIGVPDQDGRKEILQVHTRGMPLVEDIDLDDYAESTHGFVGADIESLAKEAAMNALRRVRPDIDLESDEIDAELLESISITEADFKRALNGIEPSALREVFVEVPDTTWADVGGLTDTKERLRETIQWPLDYPDVFSEMDLQSAKGVLLYGPPGTGKTLLAKAVANEANSNFISVKGPELLNKYVGESEKGVREVFEKARSNAPTVVFFDEIDAIAGQRGRATSDSGVGERVVSQLLTELDGIEALEDVVVVATSNRPDLIDDALLRPGRLDRHIHVPVPDADARRAILDVHTRDKPLADDVDLDVVAQRMDGFVGADVEALVREATMNATREFINSVDPADASDSVGNVRVTMAHFEAALGEVTASVDADVKENYEEIEQRFNTADTPTDDEPASGAFR

SEQ ID NO: 23279 - protein, 691 aa, Halobacterium sp. NRC-1
MTRVRVTLRDAADRTADAPAVGPGQLSFTAETRQQIGVAEGDAVTVTGSEDTVATVGPDTTAIAASSGLAGADVLRNVGPTDTVTVAPADPSPAAELTVAPATSSTLEGDADALARALAGRHLVADDRIAVPLFSGTVVVTLDVEDTTPGGPVTVTADTAITLTGHAADSGHADAEHATPADTRVGGLDDERGALRRLVVAPLVADSYAAIGVRPPAGVLVHGPAGTGKTTLVRAVAAAADLAVESVAPEDAGDRDALAAVLDAARDAEPGCVVFVESLAAAAPDPTADGASGRGSPSALGWLLDRVRGHDTVVVVGETTDPDAVDPALRRGGRFDAEVRVGVPDPAARRAILDVHTDGVRLADAVSLDAVADRTHGYTGADLTAVLVDAATRAAGSAAGPPVIRQRDLEAALDAVGPSTLRDASVQTPTTTYQDIGGLDRAKREVVRTVEWPQRYPALFERLDAAAPTGVLLHGPPGTGKTMLAKAVAASTDANFLSVDGPELMNRYVGESERGVRDLFERARRLAPAVVFLDEVDSLAPARHDTDTGASERVVSQLLTELDGLSPRGSVAVLAATNRRESVDPALLRPGRIETQVAVPIPDQDARAAIFEVQLDGVATGRIDTTALAAATTGYTGSDIAGVVREGALLAMEDHLRETEFDATDASGLVVTQRHLRRAIETTAPSVDGAG

SEQ ID NO: 23280 - protein, 394 aa, Halobacterium sp. NRC-1
MDVHFATVRSTNSSEGTLDVLIDGQAVTIEDNTEGDRSVGDLVEVWIDKGGRVAVEEVGRASPSVGVIREAIGGNEYLVERNGRVEVCESLDAENPEEGATVKIYGGKVTATISDEVIAPKGIEDRFGEQNRSKAYLKDPEEISEVDSGYDDVGGLTDTIEEVKDVVEIPLRESDKETNRFNKHGVEPDTGILFHGPPGTGKTLLAKAVAKETGSSIYLVNGPEIISKWYGETEDIIREIFSNAKKKKRAIIFIDEVDSIAPDRGDTKQFQRKIVAQLLTELDGFEPLNDVVVIGATNALNEVDSAIIRPGRFDRKIKFSKPTQTERMEIIEKITKDVDFGESVDLQLFAESTDGWTGADLSGVISRAVTISIRREGDLVTQDDLFRAIKGAGE

SEQ ID NO: 23281 - protein, 835 aa, Thermococcus kodakaraensis
MIFGKEDEKVDEIKLRVAEALKRDVGRGIVRFDRKYQRKLGVEPGDIVALKGERVTAAIVANAHPDDRGLDIIRMDGYIRRNAGVSIGDYVTVSRAEVQEAKKVVLAPAQKGVFIQIPGEIVKQNLLGRPVVKGDLVVAGGQNEAVYSPFDELLRGFFEAMPIGFGELKFVVVNTVPKGIVQITYNTEVEVLPQAVEVKEESIPEVTYEDIGGLSDAIQKIREMVELPLKHPELFERLGIEPPKGVLLYGPPGTGKTLLAKAVANEANAHFIAINGPEIMSKFYGESEERLREIFKEAEENAPSIIFIDEIDAIAPKREEVVGEVEKRVVSQLLTLMDGLKSRGKVIVIAATNRPDALDPALRRPGRFDREIEVGVPDKQGRKEILQIHTRGMPLEPDYDKEAVLRVLREIREKGNFDAERVDKIIAEVENAKNESEVKEALKKDAEIYSEVRNRLIDKMLDELAEVTHGFVGADLAALAREAAMVVLRRLIKEGKISPEQERIPPEVLQELRVRRDDFYEALKMVEPSALREVLIEVPNVRWEDIGGLEDVKQELREAVEWPLKYPKAFERLGIEPPKGILLYGPPGTGKTLLAKAVANESQANFIAIRGPEVLSKWVGETEKRIREIFRKARQAAPTVVFIDEIDAIAPARGSEGDRVTDRLINQLLTEMDGIQENSGVVVIGATNRPDIIDPALLRPGRFDRLILVPAPDEKARLEIFKVHTRRVPLAGDVDLRELAKKTEGYTGADIAALVREAALIAMRRIMRELPREVVESESEEFLERLKVSKKDFEMAMKKVKPSVTPYMMEYYRSFEENRKKQAGKERGGPDYYTF

SEQ ID NO: 23282 - protein, 801 aa, Drosophila melanogaster
MADSKGEDLATAILKRKDRPNRLIVEEAQNDDNSVVSLSQAKMDELQLFRGDTVILKGKRRKETVCIVLSDDTCPDEKIRMNRVVRNNLCVHLSDVVSVQSCPDVKYGKRVRILPIDESTEGVTGNLFEIYLKPYFLEAYRPIHMGDNFIVRAAMRPIEFKVVLTDPEPYCIVAPETVIFCDGDPIKREEEEESLNAVGYDDIGGCRKQLAQIKEMVELPLRHPSLFKAIGVKPPRGILMYGPPGTGKTLIARAVANETGAFFFLINGPEIMSKLAGESESNLRKAFEEAEKNSPAIIFIDEIDAIAPKRDKTHGEVERRIVSQLLTLMDGMKKSSHLIVMAATNRPNSIDPALRRFGRFDREIDIGIPDATGRLEVLRIHTKNMKLHDDVDLEQIAAESHGHVGADLASLCSEAALQQIREKMDLIDLEDDKIDAEVLASLAVTMENFRYAMTKSSPSALRETVVEVPNTTWTDIGGLESVKKELQELVQYPVEHPDKFLKFGMQPSRGVLFYGPPGCGKTLLAKAIANECQANFISVKGPELLTMWFGESEANVRDIFDKARSAAPCVLFFDELDSIAKARGGNVGDAGGAADRVINQILTEMDGMGAKKNVFIIGATNRPDIIDPAILRPGRLDQLIYIPLPDDKSREAILKANLRKSPLAKEVDLTYIAKVTQGFSGADLTEICQRACKLAIRQAIEAEIRREKERAENQNSAMDMDEDDPVPEITSAHFEEAMKFARRSVSDNDIRKYEMFAQTLQQSRGFGQNFRFPGQTGNTSGSGNNLPVNSPGDNGDDDLYS

SEQ ID NO: 23283 - protein, 801 aa, Drosophila melanogaster
MADSKGEDLATAILKRKDRPNRLIVEEAQNDDNSVVSLSQAKMDELQLFRGDTVILKGKRRKETVCIVLSDDTCPDEKIRMNRVVRNNLCVHLSDVVSVQSCPDVKYGKRVRILPIDESTEGVTGNLFEIYLKPYFLEAYRPIHMGDNFIVRAAMRPIEFKVVLTDPEPYCIVAPETVIFCDGDPIKREEEEESLNAVGYDDIGGCRKQLAQIKEMVELPLRHPSLFKAIGVKPPRGILMYGPPGTGKTLIARAVANETGAFFFLINGPEIMSKLAGESESNLRKAFEEAEKNSPAIIFIDEIDAIAPKRDKTHGEVERRIVSQLLTLMDGMKKSSHLIVMAATNRPNSIDPALRRFGRFDREIDIGIPDATGRLEVLRIHTKNMKLHDDVDLEQIAAESHGHVGADLASLCSEAALQQIREKMDLIDLEDDKIDAEVLASLAVTMENFRYAMTKSSPSALRETVVEVPNTTWTDIGGLESVKKELQELVQYPVEHPDKFLKFGMQPSRGVLFYGPPGCGKTLLAKAIANECQANFISVKGPELLTMWFGESEANVRDIFDKARSAAPCVLFFDELDSIAKARGGNVGDAGGAADRVINQILTEMDGMGAKKNVFIIGATNRPDIIDPAILRPGRLDQLIYIPLPDDKSREAILKANLRKSALAKEVDLTYIAKVTQGFSGADLTEICQRACKLAIRQAIEAEIRREKERAENQNSAMDMDEDDPVPEITSAHFQEAMKFARRSVSDNDIRKYEMFAQTLQQSRGFGQNFRFPGQTGNTSGSGNNLPVNSPGDNGDDDLYS

SEQ ID NO: 23284 - protein, 799 aa, Drosophila melanogaster
MADSKGEDLATAILKRKDRPNRLIVEEAQNDDNSVVSLSQAKMDELQLFRGDTVILKGKRRKETVCIVLSDDTCPDEKIRMNRVVRNNLCVHLSDVVSVQSCPDVKYGKRVRILPIDESTEGVTGNLFEIYLKPYFPRGLSAIHMGDNFIVRAAMRPIEFKVVLTDPEPYCIVAPETVIFCDGDPIKREEEEESLNAVGYDDIGGCRKQLAQIKEMVELPLRHPSLFKAIGVKPPRGILMYGPPGTGKTLIARAVANETGAFFFLINGPEIMSKLAGESESNLRKAFEEAEKNSPAIIFIDEIDAIAPKRDKTHGEVERRIVSQLLTLMDGMKKSSHLIVMAATNRPNSIDPALRRFGRFDREIDIGIPDATGRLEVLRIHTKNMKLHDDVDLEQIAAESHGHVGADLASLCSEAALQQIREKMDLIDLEDDKIDAEVLASLAVTMENFRYAMTKSSPSALRETVVEVPNTTWTDIGGLESVKKELQELVQYPVEHPDKFLKFGMQPSRGVLFYGPPGCGKTLPAKAIANECQANFISVKGPELLTMWFGESEANVRDIFDKGPSAAPCVLFFDELDSIAKSRCGNVGDCGAADRVINQILTEMDGMGAKKNVFIIGATNRPDIIDPAILRPGRLDQLIYIPLPDDKSREAILKANLRKFALAKEVDLTYIAKVTQGFSGADLTEICQRACKLAIRQAIEAEIRREKERAENQNSAMDDEDDPVPEITSAHFEEAMKFARRSVSDNDIRKYEMFAPDFEQSRGFGQNFRFPGQTGNTSGSGNNLPVNSPGDNGDDDLYS

SEQ ID NO: 23285 - protein, 815 aa, Plasmodium yoelii yoelii
MENNPDIKSLGDDNNGKIPKKKNLCRLIVEEATNDDNSVVALNTKRMEELNFFRGDTILIKGKKRHSTICIILNDNDLDEGKIRINKVARKNLRVCLGDIVYVKACPEIPYGKKIQVLPIDDTIEGLAKDTLFEIFLKPYFNESYRPVKKGDLFLVRGGFMSVEFKVVEVDPDDFCIVSPDTVIYYEGDPIKRDDEEKLDEIGYDDIGGCKKQLAQIREMIELPLRHPGLFKTLGVKPPRGVLLYGPPGSGKTCIARAVANETGAFFFLINGPEVMSKMAGEAEANLRRAFEEAEKNSPAIIFIDEIDSIAPKREKTNGEVERRVVSQLLTLMDGIKSRGQVVVIAATNRQNSIDPALRRFGRFDREIDIGVPDDNGRFEILRIHTKNMKLSPDVKLEELASNTHGFVGADLAQLCTEAALTCIREKMDVIDLEDEIIDKEVLESMCVTQDHFNMALGTCNPSSLRETVVEVPNVKWDDIGGLDEVKNTLREMILYPIDHPDKFEKFGMAPSRGVLFYGPPGCGKTLLAKAVASECSANFVSIKGPELLTMWFGESEANVREVFDKARAAAPCVLFFDELDSIGTQRGSSLGDGSGAGDRVMNQLLTEIDGVGPKKNLFFIGATNRPELLDEALLRPGRLDQLIYIPLPDLAARISILSAILRKCPVADNVPIDFLAQKTAGFSGADLAELCQRAARAAIRDAIDAEEMNKKSKLELNPEGNTENNQTNENQDTNNEESEIKYEITRHHFKEGLAGARRSVSQADLIKYDNFRIKFDPLYKTKSGGTNEDFIIDWPDEENNEDPQDYNVDDDLYS

SEQ ID NO: 23286 - protein, 1078 aa, Plasmodium yoelii yoelii
MFKENRINKNKKKQNDMFGQFAIVETDNETNKKNTDNEYNTKDCDITNKDLKLKDSEKLKFINDENIKYEKKHNQKVINTLKEEANLTDEKEVNLTDEKEVNLTDKNEVNLTDKNEVYLTDEKEANDSIFLNNKINDTMSKKENNSKSIINSFFQNIWGNSNTPKSRDQKNGGDKNGGDKNGGDKNGGDKNGGDKNGGDKNGGGQNGGGQNEKERPNGGGQSEGGPNGGSENETNFLLKALNSGKFPNYCLVENIDENADNFDIYMSKEKMRELNINDGFTVLLKGKKKKEMVAIAREDNRLSKYSVSISFSIKRNLRLMHNDIVKIYSLPNIKNIKNVILSPFNDTVNNITKEEIEKEILNTYLKNSYKPLSVDSTIYINYKNKRIELKVLNIITEDGQNEQHGSLTNTSILNLSETFLNREDYDQNTDDINYDDLGGMKKQLNKIRELIELPLKYPEIFVSIGISAPKGVLMHGIPGTGKTSIAKAIANESNAYCYIINGPEIMSKHIGESEQKLRKIFKKASEKTPCIIFIDEIDSIANKRNKSSNELEKRVVSQLLTLMDGLKKNNNVLVLAATNRPNSLDPALRRFGRFDREIEIPVPDEQGRYEILLTKTKKMKLDPDVNLRKIAKECHGYVGADLAQLCFEAAIQCIKEHIHFLDLEEEDFIEFMKLSVDGNINENNDNHKSENTYKNSNFKGGVKNFKNVFRLGNKNRTEQTSQNDKINMNKSGNKFDQKTKKIPSYILNKLTIKAKHFQHALNICNPSSLRERQVQIPTVTWDDIGGMQYVKEQLKETILYPLEYKHLYNKFNSNYNKGILLYGPPGCGKTLLAKAIANECNANFISVKGPELLTMWFGESEANVRDLFDKARAASPCIIFFDEIDSLAKERNSNNNNDASDRVINQILTEIDGINEKKTIFIIAATNRPDILDKALTRPGRLDKLIYISLPDFKSRCSIFKAILKNTPLNKDVDINDMAKRTEGFSGADITNLCQSAVNEAIKETIHLINLKKGKSNKNDKKKKSQGEQNYLENYDPVPTLSKKHFDVAFKNARISIQPEDVLKYEKFKEKLSLESSN

SEQ ID NO: 23287 - protein, 1034 aa, Plasmodium yoelii yoelii
MVKIKFFYYENVEEDEGGEIASDFNVYCTNDLFKLLDVKKNDNAIICHTNENKKGENENFYVYCCFKGIDEINTKSNVDRNCIYTNKYVLKSLNLDIEDEYKKKEKNIFLLNIKIIKSDSFVPIKELKLCINEIYNKVYDHLKDYCYSIDNNWNSNSMLENFWKNIKNKNFEKYINLSLLNTCLFPNNFIKISILGTCTFLSVLSLTIKKNNKNINFDTLLKQNVFQIPYIDQRTKIIIQKNDIEQMNFNENVDKNTNVDPNILTNTDFFPKKKGLNKIGGYKKIKEDIYYYILLPLLYKNIYDQFNIDVNKGVLFHGPPGCGKTFLALAIKEELIILQKKINSIKKKSNLSAQQMEIQINDQKESKSKKNNSIDVTSISTEIAKNDDIEFLIPDMEIFKSNDLIDNNNSGMKINELFLRCYKRYKEQKKCSIIFIDEIEILCEKRENSNINLYTTTLLNNMDGVRKNTHTILIGATNYINKLDLALRRSGRFDVEIEISLPNLKDRISILKKKLYNINHNINNKQIKKLADICQSFTCSDINSLINVSMYINLRENGVLSKNILNRSIKKKLAIKKTKNISEEENQTTSNKILNIDNNEINLIKNSEKKNNFNQNECVLKYDHITKGLKYVKPSGMKELYIDIPKTRIKDIGGYKIVKQCIKECLIYPKIYKKLYEKYNIQTPKGILLYGPPGCSKTLFAKAIASEINMNFISVKGPEIFSKYVGESEKTIRDIFKKARENSPCVIFFDEIDSIASNRNLNQNFVSNRVLCQLLNEIDGITIRADVIILGATNRPDLIDPAALRPGRFDRIIYVPLPNYKSRFSILKKTLKLYKISDVDNNGESLKMDNSIEQTQVEESENLQSQNEKHYFEGNIDSFNTKNMNPIKSEISKVIENNKFTNKINSIEKENEKYNSNDNNQKKPKRFTTKKREKINDNSQLLELCYFLAKKTKKYSGAEIVNICREASICALRETLKIYNTEKKGNKIDQNVLSTNSFVGLSKKHFIDVLKTIKPQTSSKLIKFYKNYNEQKKS

SEQ ID NO: 23288 - protein, 713 aa, Plasmodium yoelii yoelii
MDILFNSKDDTIDIYIFTYLLNLFNKTNIVIILLSINKPYDTILYSKIQKFISMPIPTYEDRIEILQNLSQNLEINFDVLYTASITYGFSRAQIYDILNESKNLFIYNYVLYGQNNDTPISSYFMDNNNNNNNSISINISTNEDNNYDKDLKIEDDDMSNNTTHYADEEKDSNLLKNNSPKCVNNQIENVINTNSLKNFKNGEEIEKVTNLTKRKERNNNDYLDIYIKEKKQKKIIPININNDIIYESIKNIKKKITTQNICEVPNINLDNIGSLKNIKKILETKFILPVKYSNIYKHLGINKSMGILLYGPPGCGKTMLAKAISNEMKANFIAIKGPEILNKYVGESEKKVREIFSYASTYKPCLIFFDEIDSICINRDNNKTAAASDRVVNQLLTEMDGLSQREGIYIIATTNRPDIIDKALLRTGRFDQLIYVSLPKYQGRIDILKKLSKNMPLDKDIDFKQISILTKGYSGADLHGVLRESAFIALQECRDKIDRFNYKHNGTASFVSPNIEQHRKNQQHRKNHQHCKNTKQNNNFTTSENTLNCVLNKNDTSSFESNNYYSTHILNDNNPKSLEHYNSENGQTTNNEISSNPNIMDQNICDVIQNKIMTIGDDNIKLGKIKMEERQKEEEGEGEENNNKDNFIYKIEDLKNDDLQEKDKNNLIYEFIQKNKNILAIKQKHIIKAINIVPRSVTKKQMKYYKEISKKFK

SEQ ID NO: 23289 - protein, 516 aa, Strongylocentrotus purpuratus
MSVDEICENTKMGREYALLGNYETSLVYYQGVLQQIQKLLTSVHEPQRKHQWQTIRQELSQEYEHVKNITKTLNGFKSEPAAPEPAPNHRAAPFSHHQHAAKPAAAEPARDPDVWPPPTPVDHRPSPPYQRAARKDPPRRSEPSKPANRAPGNDRGGRGPSDRRGDARSGGGGRGGARGSDKDKNRGGKSDKDKKAPSGEEGDEKKFDPAGYDKDLVENLERDIVQRNPNVHWADIAGLTEAKRLLEEAVVLPLWMPDYFKGIRRPWKGVLMVGPPGTGKTMLAKAVATECGTTFFNVSSASLTSKYHGESEKLVRLLFEMARFYAPSTIFIDEIDSICSKRGTGSEHEASRRVKSELLIQMDGVSGPSAGEESSKMVMVLAATNFPWDIDEALRRRLEKRIYIPLPEIDGREQLLRINLKEVPLADDIDLKSIAEKMDGYSGADITNVCRDASMMAMRRRIQGLRPEEIRHIPKEELNQPSTPADFLLALQKVSKSVGKEDLVKYMAWMEEFGSV

SEQ ID NO: 23290 - protein, 806 aa, Danio rerio
MASGGESKNDDLSTAILKQKNRPNRLIVDESINEDNSVVSLSQAKMDELQLFRGDTVLLKGKKRRETVCIVLSDDTCSDEKVRMNRVVRNNLRVRLGDVISIQPCPDVKYGKRIHVLPIDDTVEGITGNLFEVYLKPYFLEAYRPIRKGDIFLVRGGMRAVEFKVVETDPSPYCIVAPDTVIHCEGEPIKREDEEESLNEVGYDDIGGVRKQLAQIKEMVELPLRHPALFKAIGVKPPRGILLYGPPGTGKTLIARAVANETGAFFFLINGPEIMSKLAGESESNLRKAFEEAEKNAPAIIFIDELDAIAPKREKTHGEVERRIVSQLLTLMDGLKQRAHVIVMAATNRPNSIDPALRRFGRFDREVDIGIPDATGRLEILQIHTKNMKLADDVDLEQVANETHGHVGADLAALCSEAALQAIRKKMDLIDLEDETIDAEVMNSLAVTMDDFRWALSQSNPSALRETVVEVPNITWEDIGGLDDVKRELQELVQYPVEHPDKFLKFGMTPSKGVLFYGPPGCGKTLLAKAIANECQANFISIKGPELLTMWFGESEANVREIFDKARQAAPCVLFFDELDSIAKARGGNVGDGGGAADRVINQILTEMDGMSSKKNVFIIGATNRPDIIDPAILRPGRLDQLIYIPLPDEKSRIAILKANLRKSPISKDVDLDFLAKMTNGFSGADLTEICQRACKLAIRESIENEIRRERERQTNPSAMEVEEDDPVPEIRKDHFEEAMRFARRSVSDNDIRKYEMFAQTLQQSRGFGSFRFPSSNQGGSGPSQGSSGGGGGNVFNEDNDDDLYG

SEQ ID NO: 23291 - protein, 796 aa, Danio rerio
MKNRGGYNIDPRLKHRVHQYLKTRNDQYVDVSAMASELQQQFRIEYGRRNRTAFRIQVEKVFALICSESDSEFSALENKHLAKRARRSPEDGDGSHVTASSTDSEDDIPEHEHTNHMNSSLTSLYQRGAANASSSSTIQRSLSDDWIIDKTGDRGQESILIDLCEEESSSTTNQRDSSRLEKEKKSVKQKRQKKNKLEEDSETSAGVPAKKSKVKGFELQFSSVKFEDFGGSDETLEEVCKLLIHMRHPEVYQRLGVVPPRGFLLHGPPGCGKTLLAQAVAGETALPLLKISAPELVSGVSGESEQKLRELFEQAISSAPCILFIDEIDAITPKRETASKDMERRIVAQLLTCMDDLNSMLEPAQVLVIGATNRPDSLDPALRRAGRFDREICLGIPDEGARMKILKTLCRKIRLPDDFDFRHLARLTPGYVGADLMALCREAAMNAVNRILLEPTTEDQITPTLALARLLDLLKSSVSLSEDQLAALCVLMSDFSSSLVRVQPSAKREGFATVPDVTWADVGALQDVREELHMAIMAPIQNPEQFKALGLSAPAGLLLAGPPGCGKTLLAKAVANASGLNFISVKGPELLNMYVGESERAVRQVFQRGRNSAPCVIFFDEIDALCPRRSEHESGASVRVVNQLLTEMDGMENRRQVFIMAATNRPDIIDPAVLRPGRLDKTLYVGLPPAADRHAILNTITKGGTKPQLDSDVSLEEIAHDARCETFTGADLSALVREACVNALRVHLDPAQTHTESAKDIRVSRVHFEDAFKKVRPSVSKKDQLMYERLRETLSR

SEQ ID NO: 23292 - protein, 805 aa, Xenopus laevis
MASGSDTKSDDLSTAILKQKSRPNRLIVDESINEDNSMVSLSQAKMDELQLFRGDTVLLKGKKRREAVCIVLSDDTCSDEKIRMNRVVRNNLRVRLGDVISIQPCPDVKYGKRVHVLPIDDTVEGITGNLFEVYLKPYFLEAYRPIRKGDIFLVRGGMRAVEFKVVETDPSPYCIVAPDTVIHCEGEPIKREDEEESLNEVGYDDIGGCRKQLAQIKEMVELPLRHPALFKAIGVKPPRGILLYGPPGTGKTLIARAVANETGAFFFLINGPEIMSKLAGESESNLRKAFEEAEKNAPAIIFIDELDAIAPKREKTHGEVERRIVSQLLTLMDGLKQRAHVIVMAATNRPNSIDPALRRFGRFDREVDIGIPDSTGRLEILQIHTKNMKLSDDVDLEQVANETHGHVGADLAALCSEAALQAIRKKMDLIDLEDETIDAEVMNSLAVTMDDFRWALSQSNPSALRETVVEVPQVTWEDIGGLEDVKRELQELVQYPVEHPDKFLKFGMTPSKGVLFYGPPGCGKTLLAKAIANECQANFISIKGPELLTMWFGESEANVREIFDKARQAAPCVLFFDELDSIAKARGGNIGDGGGAADRVINQILTEMDGMSIKKNVFIIGATNRPDIIDPAILRPGRLDQLIYIPLPDEKSRMAILKANLRKSPVAKDVDVDFLAKMTNGFSGADLTEICQRACKLAIRESIENEIRRERDRQTNPSAMEVEEDDPVPEIRRDHFEEAMRFARRSVSDNDIRKYEMFAQTLQQSRGFGSFRFPAGGQSGAGPSPGAGGGSGGGHFTEEDDDLYG

SEQ ID NO: 23293 - protein, 805 aa, Xenopus laevis
MASGSDTKSDDLSTAILKQKSRPNRLIVDESINEDNSVVSLSQAKMDELQLFRGDTVLLKGKKRREAVCIVLSDDTCSDEKIRMNRVVRNNLRVRLGDVISIQPCPDVKYGKRVHVLPIDDTVEGITGNLFEVYLKPYFLEAYRPIRKGDIFLVRGGMRAVEFKVVETDPSPYCIVAPDTVIHCEGEPIKREDEEESLNEVGYDDIGGCRKQLAQIKEMVELPLRHPALFKAIGVKPPRGILLYGPPGTGKTLIARAVANETGAFFFLINGPEIMSKLAGESESNLRKAFEEAEKNAPAIIFIDELDAIAPKREKTHGEVERRIVSQLLTLMDGLKQRAHVIVMAATNRPNSIDPALRRFGRFDREVDIGIPDSTGRLEILQIHTKNMKLSDDVDLEQVANETHGHVGADLAALCSEAALQAIRKKMDLIDLEDETIDAEVMNSLAVTMDDFRWGLSQSNPSALRETVVEVPQVTWEDIGGLEDVKRELQELVQYPVEHPDKFLKFGMTPSKGVLFYGPPGCGKTLLAKAIANECQANFISIKGPELLTMWFGESEANVREIFDKARQAAPCVLFFDELDSIAKARGGNIGDGGGAADRVINQILTEMDGMSIKKNVFIIGATNRPDIIDPAILRPGRLDQLIYIPLPDEKSRMAILKANLRKSPVAKDVDVDFLAKMTNGFSGADLTEICQRACKLAIRESIENEIRRERDRQTNPSAMEVEEDDPVPEIRRDHFEEAMRLARRSVSDNDIRKYEMFAQTLQQSRGFGSFRFPAGGQSGAGPSPGAGGGSGGGHFTEEDDDLYG

SEQ ID NO: 23294 - protein, 854 aa, Xenopus laevis
MKNCPGSPGIDGRLKYRLTQYLSSNKCGGYVDIAVVAADLQKLYRADYGRRKQNAFRIQVEKVFKVISSETEGIDTLEGTHLAKRAKRGDDGNLEISSDSTDSDDYADQPSSNHMNNSLLSLYRKGNLDSVLETPVKNDLPDTSTPAHPTKNARMATVGTPQGTKTPEAGWFIDKTPSKAMEQSILIDLCEDGAEASAQNENPLDLSLLESEKKRKTPKTRNGRKSKSKANDVDAEIENRLLNDKGKGKVPEVQHSSLRFEDIGGNEDTLKEVCKMMIHMRHPEVYQHLGVVPPRGFLLHGPPGCGKTLLAQAIAGELDMPILKVAATEMVSGVSGESEQKLRELFDQAVSSAPCILFIDEIDSITPKREVASKDMERRIVAQLLTCMDDLNSLAVTTQVLVIGATNRPDSLDPALRRAGRFDREICLGIPDEGARKRILQTLCRKLKLPEPFDFCRLAHLTPGYVGADLMALCREAAMCAVNRVLIQIKDQQATTEAAVEETDPQPGAVALQAEKQTTAPAQNELHRLLALLQEQTPLPEAELLSLCIEMDDFLGALPMVQPSAKREGFATVPDVTWADIGALEEIREELTMAILAPVRNPEQFKALGLMAPAGVLLAGPPGCGKTLLAKAVANESGLNFISVKGPELLNMYVGESERAVRQVFQRATNSSPCVIFFDEIDALCPRRSGHDSGASVRVVNQLLTEMDGLESRRQVFIMAATNRPDIIDPAILRPGRLDKTLYVGLPPPADRFAILKTITKDGTRPPLEADVNLETIASDVRCDCFTGADLSALVREASISALRQEMLVQEPHTNPGQIKVSQRNFEEAFNKVKPSVSKKDQLMYELLRQSLSR

SEQ ID NO: 23295 - protein, 806 aa, Homo sapiens
MASGADSKGDDLSTAILKQKNRPNRLIVDEAINEDNSVVSLSQPKMDELQLFRGDTVLLKGKKRREAVCIVLSDDTCSDEKIRMNRVVRNNLRVRLGDVISIQPCPDVKYGKRIHVLPIDDTVEGITGNLFEVYLKPYFLEAYRPIRKGDIFLVRGGMRAVEFKVVETDPSPYCIVAPDTVIHCEGEPIKREDEEESLNEVGYDDIGGCRKQLAQIKEMVELPLRHPALFKAIGVKPPRGILLYGPPGTGKTLIARAVANETGAFFFLINGPEIMSKLAGESESNLRKAFEEAEKNAPAIIFIDELDAIAPKREKTHGEVERRIVSQLLTLMDGLKQRAHVIVMAATNRPNSIDPALRRFGRFDREVDIGIPDATGRLEILQIHTKNMKLADDVDLEQVANETHGHVGADLAALCSEAALQAIRKKMDLIDLEDETIDAEVMNSLAVTMDDFRWALSQSNPSALRETVVEVPQVTWEDIGGLEDVKRELQELVQYPVEHPDKFLKFGMTPSKGVLFYGPPGCGKTLLAKAIANECQANFISIKGPELLTMWFGESEANVREIFDKARQAAPCVLFFDELDSIAKARGGNIGDGGGAADRVINQILTEMDGMSTKKNVFIIGATNRPDIIDPAILRPGRLDQLIYIPLPDEKSRVAILKANLRKSPVAKDVDLEFLAKMTNGFSGADLTEICQRACKLAIRESIESEIRRERERQTNPSAMEVEEDDPVPEIRRDHFEEAMRFARRSVSDNDIRKYEMFAQTLQQSRGFGSFRFPSGNQGGAGPSQGSGGGTGGSVYTEDNDDDLYG

SEQ ID NO: 23296 - protein, 588 aa, Homo sapiens
MVELPLRHPALFKAIGVKPPRGILLYGPPGTGKTLIARAVANETGAFFFLINGPEIMSKLAGESESNLRKAFEEAEKNAPAIIFIDELDAIAPKREKTHGEVERRIVSQLLTLMDGLKQRAHVIVMAATNRPNSIDPALRRFGRFDREVDIGIPDATGRLEILQIHTKNMKLADDVDLEQVANETHGHVGADLAALCSEAALQAIRKKMDLIDLEDETIDAEVMNSLAVTMDDFRWALSQSNPSALRETVVEVPQVTWEDIGGLEDVKRELQELVQYPVEHPDKFLKFGMTPSKGVLFYGPPGCGKTLLAKAIANECQANFISIKGPELLTMWFGESEANVREIFDKARQAAPCVLFFDELDSIAKARGGNIGDGGGAADRVINQILTEMDGMSTKKNVFIIGATNRPDIIDPAILRPGRLDQLIYIPLPDEKSRVAILKANLRKSPVAKDVDLEFLAKMTNGFSGADLTEICQRACKLAIRESIESEIRRERERQTNPSAMEVEEDDPVPEIRRDHFEEAMRFARRSVSDNDIRKYEMFAQTLQQSRGFGSFRFPSGNQGGAGPSQGSGGGTGGSVYTEDNDDDLYG

SEQ ID NO: 23297 - protein, 431 aa, Homo sapiens
GRLEILQIHTKNMKLADDVDLEQVANETHGHVGADLAALCSEAALQAIRKKMDLIDLEDETIDAEVMNSLAVTMDDFRWALSQSNPSALRETVVEVPQVTWEDIGGLEDVKRELQELVQYPVEHPDKFLKFGMTPSKGVLFYGPPGCGKTLLAKAIANECQANFISIKGPELLTMWFGESEANVREIFDKARQAAPCVLFFDELDSIAKARGGNIGDGGGAADRVINQILTEMDGMSTKKNVFIIGATNRPDIIDPAILRPGRLDQLIYIPLPDEKSRVAILKANLRKSPVAKDVDLEFLAKMTNGFSGADLTEICQRACKLAIRESIESEIRRERERQTNPSAMEVEEDDPVPEIRRDHFEEAMRFARRSVSDNDIRKYEMFAQTLQQSRGFGSFRFPSGNQGGAGPSQGSGGGTGGSVYTEDNDDDLYG

SEQ ID NO: 23298 - protein, 893 aa, Homo sapiens
MSSKKNRKRLNQSAENGSSLPSAASSCAEARAPSAGSDFAATSGTLTVTNLLEKVDDKIPKTFQNPLIHLGLNTMKSANICIGRPVLLTSLNGKQEVYTAWPMAGFPGGKVGLSEMAQKNVGVRPGDAIQVQPLVGAVLQAEEMDVALSDKDMEINEEELTGCILRKLDGKIVLPGNFLYCTFYGRPYKLQVLRVKGADGMILGGPQSDPDTDAQRMAFEQSSMETSSLELSLQLSQLDLEDTQIPTSRSTPYKPIDDRITNKASDVLLDVTQSPGDGSGLMLEEVTGLKCNFESAREGNEQLTEEERLLKFSIGAKCNTDTFYFISSTTRVNFTEIDKNSKEQDNQFKVTYDMIGGLSSQLKAIREIIELPLKQPELFKSYGIPAPRGVLLYGPPGTGKTMIARAVANEVGAYVSVINGPEIISKFYGETEAKLRQIFAEATLRHPSIIFIDELDALCPKREGAQNEVEKRVVASLLTLMDGIGSEVSEGQVLVLGATNRPHALDAALRRPGRFDKEIEIGVPNAQDRLDILQKLLRRVPHLLTEAELLQLANSAHGYVGADLKVLCNEAGLCALRRILKKQPNLPDVKVAGLVKITLKDFFQAMNDIRPSAMREIAIDVPNVSWSDIGGLESIKLKLEQAVEWPLKHPESFIRMGIQPPKGVLLYGPPGCSKTMIAKALANESGLNFLAIKGPELMNKYVGESERAVRETFRKARAVAPSIIFFDELDALAVERGSSLGAGNVADRVLAQLLTEMDGIEQLKDVTILAATNRPDRIDKALMRPGRIDRIIYVPLPDAATRREIFKLQFHSMPVSNEVDLDELILQTDAYSGAEIVAVCREAALLALEEGIQANLIMKRHFTQALSTVTPRIPESLRRFYEDYQEKSGLRTL

SEQ ID NO: 23299 - protein, 744 aa, Ferroplasma acidarmanus
MKPNDGILLRIAEANATDPGMARVRLDEISRLDLDVEIGDVVAIEKVRSTVGRVFRSRPEDENKGIVRIDSVMRNNCGASIGDKVKVKKVEVEEAKKVVLAPIIRKDQKLRFGEGIDDFVQKALIRRPLIEQDSISVPGLTLAGHTGLLFKVIKTIPSKIPVEVSEETRVEIREDPASEVLEEVTKVSYEDIGGLSDQLGKIREIIELPLKHPELFERLGITPPKGVLLNGPPGTGKTLIAKAVANESGANFFAINGPEIMSKYYGQSEQKLREIFQKADESEPSIIFIDEIDSIAPKREDVQGEVERRVVAQLLTLMDGLKDRGHVIVIGATNRLDAVDPALRRPGRFDREIVIGVPDKKGRMEILTIHTRGMPLGMDDEKESEFFSRIADITYGFVGADLAALTRESAMNALRRYLPEIDLDKPIPTEVLEKMIVTEDDFMEALKTIEPSSLREVTVEVPNIKWNDIGGLEALKSELREAVELPLLNPDVFSRLGIRAPKGFLLYGPPGTGKTLLAKAVANESNANFISVKGPEVLSKWVGDSEKAVREIFKKAKQVSPAIIFMDEIDSIAPRRGTSMDSGVTERIVNQLLTSMDGIEVLKGVVVIAATNRPDIIDPALLRAGRFDKIIYIPPPEEEGRLKILEVHTRKMPLAKDVDLKDIARKTDGYVGADLENLCREAGMMAYRNNPEATEVNQDAFIKAMKTIRPSIDKNVTKFYSDLAATMGRDISEKKKTEDLGLYQ

SEQ ID NO: 23300 - protein, 373 aa, Ferroplasma acidarmanus
MLMTRSSTMTETKIDHVSLLIRKAIEEESSGNKNEAARTYKAAYKEVLEIASRSTGKIKQKRLEQAANLKKIYESIGGEAVEEDRISEGKKILGTLNIEPPEIPKVTFQDVAGLENVKTEIMSKIIYPMRYKELSQEYNIEFSGGMLLYGPPGTGKTFIVKAIANEVKANFINVNPSTLYSQWFGQFEKNISLLFRAAYLLSPSILFFDEIDTLVPKRSGSESDAARRGVSQLLTEVGGLTSQKDRNVFIIAATNNPWGIDEAIMRPGRFDVKIYIPPPDYESRKKIFQLKLSEVKHIDHIDYDELANKTERYSGADIEFICKKAVQNVFMEVIKTGNKIDVSTDDLLEVISQIRPSIDAGLLRKYQDYILNL

SEQ ID NO: 23301 - protein, 806 aa, Sus scrofa
MASGADSKGDDLSTAILKQKNRPNRLIVDEAINEDNSVVSLSQPKMDELQLFRGDTVLLKGKKRREAVCIVLSDDTCSDEKIRMNRVVRNNLRVHLGDVISIQPCPDVKYGKRIHVLPIDDTVEGITGNLFEVYLKPYFLEAYRPIRKGDIFLVRGGMRAVEFKVVETDPSPYCIVAPDTVIHCEGEPIKREDEEESLNEVGYDDIGGCRKQLAQIKEMVELPLRHPALFKAIGVKPPRGILLYGPPGTGKTLIARAVANETGAFFFLINGPEIMSKLAGESESNLRKAFEEAEKNAPAIIFIDELDAIAPKREKTHGEVERRIVSQLLTLMDGLKQRAHVIVMAATNRPNSIDPALRRFGRFDREVDIGIPDATGRLEILQIHTKNMKLADDVDLEQVANETHGHVGADLAALCSEAALQAIRKKMDLIDLEDETIDAEVMNSLAVTMDDFRWALSQSNPSALRETVVEVPQVTWEDIGGLEDVKRELQDLVQYPVEHPDKFLKFGMTPSKGVLFYGPPGCGKTLLAKAIANECQANFISIKGPELLTMWFGESEANVREIFDKARQAAPCVLFFDELDSIAKARGGNIGDGGGAADRVINQILTEMDGMSTKKNVFIIGATNRPDIIDPAILRPGRLDQLIYIPLPDEKSRVAILKANLRKSPVAKDVDLEFLAKMTNGFSGADLTEICQRACKLAIRESIESEIRRERERQTNPSAMEVEEDDPVPEIRRDHFEEAMRFARRSVSDNDIRKYEMFAQTLQQSRGFGSFRFPSGNQGGAGPSQGSGGGTGGSVYTEDNDDDLYG

SEQ ID NO: 23302 - protein, 256 aa, Saussurea medusa
MVRAPCFDKHGIKRGAWSQEEDNKLRAHIQRSGHSNWRQLPKLAGLSRCGKSCRLRWVNYLRPTIKHGNFTKDEKDVVVALHNKLGNKWSAIAARLPGRSDNEIKNYWHTHLKNRAQTDQTVLQTKQDGNAETSKGKGTPKAGCVVRKPNVKSQQEVEILLAVLSSASSSSFSSSTTSDQNESSPPSLSVSDANVTPQCSEEAARSLCIDQFLVEEDSIMLSSDKMYSPLGSVDYFISQDNVMDDVLLWPNLDFYY

SEQ ID NO: 23303 - protein, 184 aa, Lilium hybrid division I
MDRKVGTNEDVEVRKGPWTMEEDLILINYIANHGDGVWNTLARSAGLKRTGKSCRLRWLNYLRPDVRRGNITPEEQLLIMELHDRWGNRWSKIAKELPGRTDNEIKNFWRTRVQKKSKNGESSEGQISMLSDETSAMQMEDVDVGVSQTSYDQGQTSNNLDAFEIPFEPGDNLLSVEELWAMQY

SEQ ID NO: 23304 - protein, 113 aa, Zea luxurians
MGRRACCAKEGVKRGAWTSKEDDALAAYVKAHGEGKWREVPQKAGLRRCGKSCRLRWLNYLRPNIRRGNISYDEEDLIIRLHRILGNRWSLIAGRLPGRTDNEIKNYWNSTLV

SEQ ID NO: 23305 - protein, 113 aa, Zea luxurians
  unsure (1)..(113): unsure at all Xaa locations
MGRRACCAKEGVKRGAWTTKEDDALAAYVKAHGEGKWREVPQKAGLRRCGKSCRLRWLNYLRPNIRRGNISYDEEDLIIRLHKLLGNRWSLIAGRLPGRTDNEIKNYWXSTLV

SEQ ID NO: 23306 - protein, 113 aa, Zea luxurians
  unsure (1)..(113): unsure at all Xaa locations
MGRRACCAKEGVKRGAWTTKEDDALAAYVKAHGEGKWREVPXKAGLRRCGKSCRLRWLNYLRPNIRRGNISYDEEDLIIRLHKLLGNRWSLIAGRLPGRTDNEIKNYWNSTLV

SEQ ID NO: 23307 - protein, 367 aa, Dendrobium sp. XMW-2002-1
  unsure (1)..(367): unsure at all Xaa locations
MGRSPCCDKVGLKKGPWTPEEDQKLLAYIEKHGHGSWRALPNKAGLQRCGKSCRLRWTNYLRPDIKRGKFSMQEEQTIIQLHALLGNRWSAIATHLPKRTDNEIKNYWNTHLKKRLAKMGIDPITHKPKSDNLSSADGHSKCTANLNHMAQWESARLEAEARLVRESKLRSSSISXNTTTIFTSKNQPLLPPAVPMTPAASPCLDVLSAWQGAWTKPAANNSQGRGYTIDLESPTSTLSFSDNMMAPTISGMGLAEDSTREDQEWKCLRKTGFSMHTAAPFVSTEASSWLSESSGGDFAAGFTGMLSDKANEQNSEDGCNDSDNAECGSCVDVEESEGEEDENKNYWSSILNLVNSSSPPNSPPPVF

SEQ ID NO: 23308 - protein, 216 aa, Dendrobium sp. XMW-2002-8
MGRSPCCEKAHTNKGAWTKEEDERLVAYIKVHGEGCWRSLPKAAGLLRCGKSCRLRWINYLRPDLKRGNFTEEEDELIIKLHSLLGNKWSLIAGRLQGRTDNEIKNYWNTHIRRKLLSRGIDPTTHRPLHGQADASFVNEVEKVVSFRRREDENKSSNSSSSNSRSNSEEAKRWRCPDLNLELCISPPLQKQEDSEEDMMREEFGLCFTNGLLEFR

SEQ ID NO: 23309 - protein, 151 aa, Dendrobium sp. XMW-2002-9
MEEDGILINYIANHGEGVWNNLAKSAGLKRTGKSCRLRWLNYLRPDVRRGNITPEEQLLIMELHARWGNRWSKIARQLPGRTDNEIKNYWRTRIQKKVKNGDAVDYSSQMIIDEACTSHTSSIEEGMAQQNYPVHPNTNPEGYRLQTTRVN

SEQ ID NO: 23310 - protein, 220 aa, Dendrobium sp. XMW-2002-10
MGRSACCEKAHTNKGAWTKEEDERLIAHIRTHGEGCWRSLPKAAGLLRCGKSCRLRWINYLRPDLKRGNFTDEEDELIIKLHSLLGNKWSLIAGRLPGRTDNEIKNYWNTHIRRKLLNRGIDPATHRPVSTATASNLTMSFSSGSSVKDKRTSSSSSSSRVGRISALLPRCPDLNLDLCISPSLEEQMPQDLLVEESNCGGEFLRLGSSFLLDYRSLEMK

SEQ ID NO: 23311 - protein, 421 aa, Physcomitrella patens
MGRKPCCEKVGLRRGPWTSEEDQKLVSHITNNGLSCWRAIPKLAGLLRCGKSCRLRWTNYLRPDLKRGIFSEAEENLILDLHATLGNRWSRIAAQLPGRTDNEIKNYWNTRLKKRLRSQGLDPNTHLPLEDSKLDDTEDDTDDEGGDSSDVTMSDASKSEKRSKKKSKPKETVKVRQPKGPKPAPQLKMCQSDEGPVLLKVPKAPKSPISVNPGPGCNYDDDSEHSSSSTVTTKSHEDHRDSSDFIKALTSVSSFPEAELWSCIKPITNSFSSTALLSEWDSYRAFDSSLFPSSYPQLNSGLPKLEDVNSKSSAVASPVQGMLPAYNPMGMEMQTRMQFSSQLTHEIGQNYGGIFQETCYPQPDMGMSWSMHAELSHCGTESLFATPNPANAPSNFEEVPQPSPCTTSQELQRLAALLDLI

SEQ ID NO: 23312 - protein, 193 aa, Cucumis sativus
  unsure (1)..(193): unsure at all Xaa locations
TGDEGNNEYKKGLWTVEEDKILMDYVKAHGKGHWNRIAKKTGLKRCGKSCRLRWMNYLSPNVKRGNFTEQEEDLIIRLHKLPGNRWSLIAKRVPGRTDNQVKNYWNTHLSKKLGIKDQKTKQSNGDIVYQINLPNPTETSEETKISNIVDNNNILGDEIQEDHQGSNYLSSLWVHEDEFELSTLTNMMDFINX

SEQ ID NO: 23313 - protein, 367 aa, Arabidopsis thaliana
MKERQRWSGEEDALLRAYVRQFGPREWHLVSERMNKPLNRDAKSCLERWKNYLKPGIKKGSLTEEEQRLVIRLQEKHGNKWKKIAAEVPGRTAKRLGKWWEVFKEKQQREEKESNKRVEPIDESKYDRILESFAEKLVKERSNVVPAAAAAATVVMANSNGGFLHSEQQVQPPNPVIPPWLATSNNGNNVVARPPSVTLTLSPSTVAAAAPQPPIPWLQQQQPERAENGPGGLVLGSMMPSCSGSSESVFLSELVECCRELEEGHRAWADHKKEAAWRLRRLELQLESEKTCRQREKMEEIEAKMKALREEQKNAMEKIEGEYREQLVGLRRDAEAKDQKLADQWTSRHIRLTKFLEQQMGCRLDRP

SEQ ID NO: 23314 - protein, 187 aa, Fragaria x ananassa
MRKPCCEKTETTKGAWSIQEDQKLIDYIQKHGEGCWNSLPKAAGLRRCGKSCRLRWINYLRPDLKRGSFGEDEEDLIIRLHKLLGNRWSLIAGRLPGRTDNEVKNYWNSHLKKKILKTGTTLRPNKPHENNHAPNNKLVKLFNKMDDEVVDEVSSADSAAGCLVPELNLDLTLSIKTSTGMADPQVA

SEQ ID NO: 23315 - protein, 334 aa, Medicago truncatula
MSDMKDRQRWRAEEDALLRAYVKQYGPREWNLVSQRMNTPLNRDAKSCLERWKNYLKPGIKKGSLTEEEQRLVISLQATHGNKWKKIAAQVPGRTAKRLGKWWEVFKEKQQRETKGSINRTVDPINDSKYEHILESFAEKLVKERPSPSFVMAASNSSYLHTDAQAPTPGLLPSWLSNSNNAAPVRPNSPSVTLSLSPSTVAAPPPWMQPVRGPDNAPLVLGNVAPHGAVLSYGESMVMSELVDCCKELEEVHHALAAHKKEAAWRLSRVELQLESEKASRRREKMEEIEAKIKALREEQAVALDRIEGEYREQLAGLRRDAETKEQKLAEQWA

SEQ ID NO: 23316 - protein, 359 aa, Pisum sativum
MSLEMKDRQRWRAEEDALLRAYVKQYGPREWNLVSQRMNTPLNRDAKSCLERWKNYLKPGIKKGSLTEEEQHLVISLQATHGNKWKKIAAQVPGRTAKRLGKWWEVFKEKQQRETKGINKTVDPINDSKYEHILESFAEKLVKERPSPSFVMAASNSSYLHTDAQAATPGLLPSWLSNSNNTAPVRPNSPSVTLSLSPSTVAAPPPWMQPVRGPDNAPLVLGNVAPHGAVLSYGENMVMSELIDCCKELEEGHHALAAHKKEAAWRLSRVELQLESEKASRRREKMEEIEAKIKALREEQAVALDRIEGEYREQLAGLRRDAEAKEQKLAEQWAAKHLRLTKFLEQVGCRSRHAEQNGR

SEQ ID NO: 23317 - protein, 342 aa, Oryza sativa (japonica cultivar-group)
MQPPPMRERQRWRPEEDAILLAYVRQYGPREWSLVSQRMNRPLHRDAKSCLERWKNYLRPGIKKGSLTDDEQRLVIRLQAKHGNKWKKIAAEVPGRTAKRLGKWWEVFKEKQQRELRDRDRRRLPPPLDGDERGCAGGRYDWLLEDFADKLVNDHHRRMMAAPILPPWMSSSPSSSSSPSVTLSLASAAVAPAPAAPPPTWGGGGGGEVVVAELMECCREMEEGQRAWAAHRKEAAWRMKRVEMQLETERACRRREATEEFEAKMRALREEQAAAVERVEAEYREKMAGLRRDAEAKEQKMAEQWAAKHARLAKFLDQVAACRRWPPVEINGGGGGGPGGGR

SEQ ID NO: 23318 - protein, 337 aa, Oryza sativa (japonica cultivar-group)
MRERQRWRPEEDAILLAYVRQYGPREWSLVSQRMNRPLHRDAKSCLERWKNYLRPGIKKGSLTDDEQRLVIRLQAKHGNKWKKIAAEVPGRTAKRLGKWWEVFKEKQQRELRDRDRRRLPPPLDGDERGCAGGRYDWLLEDFADKLVNDHHRRMMAAPILPPWMSSSPSSSSSPSVTLSLASAAVAPAPAAPPPTWGGGGGGEVVVAELMECCREMEEGQRAWAAHRKEAAWRMKRVEMQLETERACRRREATEEFEAKMRALREEQAAAVERVEAEYREKMAGLRRDAEAKEQKMAEQWAAKHARLAKFLDQVAACRRWPPVEINGGGGGGPGGGR

SEQ ID NO: 23319 - protein, 360 aa, Lycopersicon esculentum
MRERQRWRAEEDALLRAYVRQYGPKEWPLVSQRMNTPLNRDAKSCLERWKNYLKPGIKKGSLTEDEQRLVIQLQAKHGNKWKKIAAEVPGRTAKRLGKWWEVFKEKQQREQKENNKVVDPVDEGKYDHILETFAEKIVKERSVPGLLMATSNGGFLHADASTPTPQTLLPPWLSNSSAPSTVRSSSPSVTLSLSPSTVPPTPTPGIPWLQTDRGPDNAPLILSSFPHHSVAPCGENPFITELAECCKDLDEGHRTWTAHKKEAAWRLRRVELQLESEKASKVREKMEEIEAKMKALREEQKATLDRIEAEYKEQLAGLRRDAEAKEQKLAEQWTSKHMRLAKFLEQMGCQSRLAEPNGGR

SEQ ID NO: 23320 - protein, 182 aa, Nicotiana tabacum
FKEKQQREQKENNKVVDPVDEGKYDHILETFAEKIVKERSVPGLLMATSNGGFLHTDAPAPSPQTLLPPWLSNSTATSTVRSQSPSVTLSLSPSTVPPTPTPGIPWLQTDRGPENAPLILSSFPHHGVAPPCGENPFVTELAECCKELDEGHRAWAAHKKEAAWRLRRVELQLESEKTSKVR

SEQ ID NO: 23321 - protein, 255 aa, Petunia integrifolia
MSTSNASTSGVRKGAWTEEEDLLLRECIEKYGEGKWHLVPVRAGLNRCRKSCRLRWLNYLRPHIKRGDFSLDEVDLILRLHKLLGNRWSLVAGRLPGRTANDVKNYWNTHLRKKLIAPHDQKQESKNKAMKITENNIIKPRPQTFSRPAMNHVSCWNGKSCSKNTIDKNEGDTEIIKFSDEKQKPEESIDDGLQWWANLLANNIEIEELVSCNSPTLLHEETAPSVNAESSLTQGGGSGLSDFSVDIDDIWDLVS

SEQ ID NO: 23322 - protein, 255 aa, Petunia integrifolia
MSTSNASTSGVRKGAWTEEEDLLLRECIEKYGEGKWHLVPVRAGLNRCRKSCRLRWLNYLRPHIKGGDFSLDEVDLILRLHKLLGNRWSLIAGRLPGRTANDVKNYWNTHLRKKLIAPHDQKQESKNKAMKITENSIIKPRPRTFSRPAMNHVSCWNGKSCNKNTIDKNEGDTEIIKFGDEKQKPEESIVDGLQWWANLLANNIEIEELVSYNSPTLLHEETAPSVNAESSLTQEGGSGLSDFSVDIDDIWDLLS

SEQ ID NO: 23323 - protein, 215 aa, Solanum tuberosum
MKDKEVKTRMKRGFWKPEEDLILKNCVETHGEGNWATISEKSGLMRSGKSCRLRWKNYLRPNIKRGMMSEDEKDLIIRLHKLLGNRWSLIAGRLPGRTDNEVKNFWNTHLNNKRSCRGKKKHVKSKEANTQSTQGKMQEYPAETVSNQEVATKTVLDSWIEEMQDFNCSLLSPLTMNNMPFLEDEPFIPILDDIVLLEAFTSTGKEAWNEIQPFL

SEQ ID NO: 23324 - protein, 357 aa, Antirrhinum majus
MKERQRWRPEEDALLRAYVKEYGPRDWHLVTQRMNKPLNRDAKSCLERWKNYLKPGIKKESLTQEEQILVINLQAKHGNKWKKIAAEVPGRTAKRLGKWWEVFKEKKQREEKDNKKITEPIEEGKYDRILETFAEKIVKERVVSRIITMPPTSNSGFLQNDPSPHSAQSVLPPWLASSSMTTTIRPQSPSVTLSLSPSVVPPAPAIPWLHPDNTTHGPSNLSSLGVVAPFMGENHIVPELLECCRELEEGQRAWAAHRKEAAWRLKRVELQLESEKACRRREKMEEIEAKMKALREEQKASLDRIEAEYREQLAGLRREAEVKEQKLAEQWAAKHLRLTKFLEQTGYRSIAGELNGR

SEQ ID NO: 23325 - protein, 110 aa, Lolium perenne
MGRSPCCEKMGLKRGPWTAEEDKILVAHITSFGHGNWRALPKQAGLLRCGKSCRLRWINYLRPDIKRGNFSDEEEQSIIQLHQLLGNRWSAIAARLPGRTDNEIKNYWNT

SEQ ID NO: 23326 - protein, 343 aa, Oryza sativa
  unsure (1)..(343): unsure at all Xaa locations
MQPPPMRERQRWRPEEDAILLAYVRQYGPREWSLVSQRMNRPLHRDAKSCLERWKNYLRPGIKKGSLTDDEQRXLVIRLQAKHGNKWKKIAAEVPGRTAKRLGKWWEVFKEKQQRELRDRDRRRLPPPLDGDERGCAGGRYDWLLEDFADKLVNDHHRRMMAAPILPPWMSSSPSSSSSPSVTLSLASAAVAPAPAAPPPTWGGGGGGEVVVAELMECCREMEEGQRAWAAHRKEAAWRMKRVEMQLETERACRRREATEEFEAKMRALREEQAAAVERVEAEYREKMAGLRRDAEAKEQKMAEQWAAKHARLAKFLDQVAACRRWPPVEINGGGGGGPGGGR

SEQ ID NO: 23327 - protein, 132 aa, Oryza sativa
  unsure (1)..(132): unsure at all Xaa locations
XSARAFGENMVMSELAERRKELDEVHHALAGHMKEAAWRLSRVELQLESEKAGRRREKMEEIEAKIKALREEQTAALDRIEAEYREQLAGLRRDAESKEQKLAEQWAAKHLRLTKFLEQVGCRSRLTEPNGR

SEQ ID NO: 23328 - protein, 301 aa, Triticum aestivum
  unsure (1)..(301): unsure at all Xaa locations
MEMKERQRWRPEEDAILRSYVRQYGPREWNLVAQRMNVPLDRDAKSCLERWKNYLRPGIKKGSLTDDEQRLVIRLQAKHGNKWKKIAAEVPGRTAKRLGKWWEVFKEKQQREIRDSRRPPPEPSPDERGRYEWLLENFAEKLVKERQQVGVGATPLHHHLMAAPMLPPWMSSTATNGAPVSPAPPSPSVTLSLASAVVPPPTAAPWMQQQQQMAEDGAAFGFARPPPAPGMVPDAPQAALAELAECCRELDEGHRAWAAHRKEASWRLKRVELQLESERACRRREAAEEFEAKMRALWEEX

SEQ ID NO: 23329 - protein, 369 aa, Zea mays
MKERQRWRPEEDAVLRAYVRQYGPREWHLVSQRMNVALDRDAKSCLERWKNYLRPGIKKGSLTEEEQRLVIRLQAKHGNKWKKIAAEVPGRTAKRLGKWWEVFKEKQQRELRDSRRPPPEPSPDERGRYEWLLENFAEKLVGERPQQAAAAPSPLLMAAPVLPPWLSSNAGPAVAAAAVAHPPPRPPSPSVTLSLASAAVAPGPPAPAPWMPERAAADAAPYGFPSPPQHGGAAPPGMTVVDGQALAELAECCRELEEGRRAWATHRREAAWRLKRVEQQLEMEREMRRREVWEEFEAKMRTMRLEQAAAAERVERDHREKVAELRRDAQVKEEKMAEQWAAKHARVAKFVEQMGACSRSWSSATDMNC

SEQ ID NO: 23330 - protein, 370 aa, Zea mays
MKERQRWRPEEDAVLRAYVRQYGPREWHLVSQRMNVALDRDAKSCLERWKNYLRPGIKKGSLTEEEQRLVIRLQAKHGNKWKKIAAEVPGRTAKRLGKWWEVFKEKQQRELRDSRRPPPEPSPDERGRYEWLLENFAEKLVGERPQQAAAAPSPLLMAAPVLPPWLSSNAGPAAAAAAAVAHPPPRPPSPSVTLSLASAAVAPGPPAPAPWMPDRAAADAAPYGFPSPSQHGGAAPPGMAVVDGQALAELAECCRELEEGRRAWAAHRREAAWRLKRVEQQLEMEREMRRREVWEEFEAKMRTMRLEQAAAAERVERDHREKVAELRRDAQVKEEKMAEQWAAKHARVAKFVEQMGGCSRSWSSATDMNC

SEQ ID NO: 23331 - protein, 370 aa, Zea mays; identical to SEQ ID NO: 23330

SEQ ID NO: 23332 - protein, 308 aa, Zea mays
  unsure (1)..(308): unsure at all Xaa locations
MKERQRWRPEEDAVLRAYVRQYGPREWHLVSQRMNVALDRDAKSCLERWKNYLRPGIKKGSLTEEEQRLVIRLQAKHGNKWKKIAAEVPGRTAKRLGKWWEVFKEKQQRELRDSRRPPPEPSPDERGRYEWLLENFAEKLVGERPQQAAAAPSPLLMAAPVLPPWLSSNAGPAAAAAAAVAHPPPRPPSPSVTLSLASAAVAPGPPAPSPWMPDRAAADQAPYGFPSPPQHGGAAPPGMAVVDGQALAELAECCRELEEGRRAWATHRREAAWRLKRVEQQLEMEREMRRREVWEEFEAKMRTMRLEX

SEQ ID NO: 23333 - protein, 223 aa, Arabidopsis lyrata
MRIRRREEKENQEYKKGLWTVEEDNILMDYVLNHGTGQWNRIVRKTGLKRCGKSCRLRWMNYLSPNVNKGNFTEQEEDLIIRLHKLLGNRWSLIAKRVPGRTDNQVKNYWNTHLSKKLVGDYSSAVKTTGEDDDSLPSLFITAATTSCHHQQENVYENIAKRFDGVVSASYEDKPKQELAQNDVLMATTNDPSHYYGNNALWVHDDDFELSSLFTRNDEFCFW

SEQ ID NO: 23334 - protein, 256 aa, Arabis gemmifera
MEDYERNSNSPTHEEDSDVRKGPWTEDEDAILVNFVSIHGDARWNHIARSSGLKRTGKSCRLRWLNYLRPDVRRGNITLEEQFMILKLHSLWGNRWSKIAQYLPGRTDNEIKNYWRTRVQKQAKHLRCDVNSNLFKETMRNVWMPRLVERINAQSSPATCEPVESMITDPGQPIEEPIPVEPGFLQFNQQFVPASELSATSSNSPAETLSDVQGGVVNGSGSDPAGQTGFGEFNDWGCVGGDNIWTDEESFWFLQD

SEQ ID NO: 23335 - protein, 157 aa, Gossypium raimondii
NKGSWTAEEDRRLAKYIEIHGAKRWKTIAIKSGLNRCGKSCRLRWLNYLRPNIKRGNISDEEEDLIIRLHKLLGNRWSLIAGRLPGRTDNEIKNYWNSHLSKKMINHDVRTEQTSSLEQIVPYKAWETVQMEEEEVVKGSDEIENSEFSIDVDEFFD

SEQ ID NO: 23336 - protein, 184 aa, Gossypium raimondii
FDVNKGAWTAEEDRKLAEVIAVHGAKRWKTIPTIAGLNRCGKSCRLRWMNYLRPNIKRGNISDQEEDLILRLHKLLGNRWSLIAGRLPGRTDNEIKNYWNSHLSKKVNQKEKHSGASARQGCKFAQQRLVENAKEQVREENTSTGFEESNISFDVDDFFDFSKVDTRNFEWVNRFLEVDDGFKF

SEQ ID NO: 23337 - protein, 272 aa, Oryza sativa (indica cultivar-group)
MGRRACCAKEGMKRGAWTSKEDDVLASYIKSHGEGKWREVPQRAGLRRCGKSCRLRWLNYLRPNIKRGNIDDDEEELIVRLHTLLGNRWSLIAGRLPGRTDNEIKNYWNSTLSRKIGTAATAAAGSRGGSTPDTARATDAASSSSVVPPGQQQQPASRADTDTATAAAAAAATTTTVWAPKAVRCTRGFFFHDRETAPLAAAAPAPAGELGDGDDVDCDYYCSGSSSAATTTSSSSLPAVVEPCFSAGDDWMDDVRALASFLDTDDAWNLCA

SEQ ID NO: 23338 - protein, 333 aa, Craterostigma plantagineum
MNQQQVKVSKNNKQVNNCEDDDDSSDLRRGPWTVDEDFTLINYIAHHGEGRWNSLARFAGLKRTGKSCRLRWLNYLRPDVRRGNITLEEQLLILELHSRWGNRWSKIAQHLPGRTDNEIKNYWRTRVQKHAKQLKCDVNSKQFKDTMRYLWMPRLVERIQASATTDDGAPPAVASSPSSAMNTACYSAAMAAGDHRRQFMLMPQYYATTTTTHNNSMIAQENSSTVASSESFGSLSSELTAEANYANYHRVINGADHQQIDSSTTSYDWQNCAVGNNGNSDQLGMGFADDRRSNEQWMMMTDDVVDNGGSSDQDNNLWNVDDVWFLQQFSSCF

SEQ ID NO: 23339 - protein, 333 aa, Craterostigma plantagineum
MNQQQVKVSKNNKQVNNCEDDDDSSDLRRGPWTVDEDFTLINYIAHHGEGRWNSLARFAGLKRTGKSCRLRWLNYLRPDVRRGNITLEEQLLILELHSRWGNRWSKIAQHLPGRTDNEIKNYWRTRVQKHAKQLKCDVNSKQFKDTMRYLWMPRLVERIQASATTDDGAPPAVVSSPSSAMNTACYTTAMAAGDHRRQFMLMPQYYATTTTTHNNSMIAQENSSTVASSESFGSLSSELTAEANYANYHRVINGADHQQIDSSTTSYGWQNCAVGNNGNSDQLGMGFADDRRSNEQWMMMTDDVVDNGGSSDQDNNLWNVDDVWFLQQFSSCF

SEQ ID NO: 23340 - protein, 335 aa, Craterostigma plantagineum
MNQQQVVKVSKNKQINSEDDDDSSDLRRGPWTVDEDFTLINYIAHHGEGRWNSLARFAGLKRTGKSCRLRWLNYLRPDVRRGNITLEEQLLILELHSRWGNRWSKIAQHLPGRTDNEIKNYWRTRVQKHAKQLKCDVNSKQFKDTMRYLWMPRLVERIQRAATTDDGAPPLASSASSPSSAMNTACYSTAMAAGDHRRQFMLMPQYYAMTTHSNLMIAQENSSTVASSESFGSLSSELTEANYANYHQVINGADHQQIDSSTTTSYGWQNDFAINTVGNNGNSDQLGMGSVDDRRSNEQWMMMDDVDNGGSSDKDNNLLWNVDDVWFLQQFSSCF

SEQ ID NO: 23341 - protein, 333 aa, Ipomoea nil
MDGMFGFHSTPDYGSRALMSPENLMDCGYSYNGLISPSAPDRIPVFASDDPTATGSFPCSVVSEAASVAPDVYRRGGGGGRREDAAGEKEDDDDHGIGLIKAKIASHPSYPKLLEAYIDCQKVGAPPEIASFLDEIRRENDLFKHDSRVSTCFGDDPELDIFMETYCDILVKYKSDLSRPFDEAKTFLNKIETQLSNLCKDDGVVSSDDDEYSGGEAEEQDSAVKGEDRELKSRLLQKYGGHISSLKLEFSKKKKKGKLPKDARQILLEWWKGHYRWPYPTEDDKISLAELTGLDQKQINNWFINQRKRHWKPSEHMQLAVMDNLAGQFFTQD

SEQ ID NO: 23342 - protein, 398 aa, Arabidopsis thaliana
MEEYQHDNSTTPQRVSFLYSPISSSNKNDNTSDTNNNNNNNNSSNYGPGYNNTNNNNHHHQHMLFPHMSSLLPQTTENCFRSDHDQPNNNNNPSVKSEASSSRINHYSMLMRAIHNTQEANNNNNDNVSDVEAMKAKIIAHPHYSTLLQAYLDCQKIGAPPDVVDRITAARQDFEARQQRSTPSVSASSRDPELDQFMEAYCDMLVKYREELTRPIQEAMEFIRRIESQLSMLCQSPIHILNNPDGKSDNMGSSDEEQENNSGGETELPEIDPRAEDRELKNHLLKKYSGYLSSLKQELSKKKKKGKLPKEARQKLLTWWELHYKWPYPSESEKVALAESTGLDQKQINNWFINQRKRHWKPSEDMQFMVMDGLQHPHHAALYMDGHYMGDGPYRLGP

SEQ ID NO: 23343 - protein, 400 aa, Arabidopsis thaliana
MEEYQHDNSSTPQRVSFLYSPISSSNKNDNTSDTNNNNNNNNSSNYGPGYNNTNNNNHHHQHMLFPHMSSLLPQTTENCFRSDHDQPNNNNNNPSVKSEASSSRINHYSMLMRAIHNTQEANNNNNNDNVSDVEAMKAKIIAHPHYSTLLQAYLDCQKIGAPPDVVDRITAARQDFEARQQRSTPSVSASSRDPELDQFMEAYCDMLVKYREELTRPIQEAMEFIRRIESQLSMLCQSPIHILNNPDGKSDNMGSSDEEQENNSGGETELPEIDPRAEDRELKNHLLKKYSGYLSSLKQELSKKKKKGKLPKEARQKLLTWWELHYKWPYPSESEKVALAESTGLDQKQINNWFINQRKRHWKPSEDMQFMVMDGLQHPHHAALYMDGHYMGDGPYRLGP

SEQ ID NO: 23344 - protein, 400 aa, Arabidopsis thaliana
MEEYQHDNSSTPQRVSFLYSPISSSNKNDNTSDTNNNNNNNNSSNYGPGYNNTNNNNHHHQHMLFPHMSSLLPQTTDNCFRSDHDQPNNNNNNPSVKSEASSSRINHYSMLMRAIHNTQEANNNNNNDNVSDVEAMKAKIIAHPHYSTLLQAYLDCQKIGAPPDVVDRITAARQDFEARQQRSTPSVSASSRDPELDQFMEAYCDMLVKYREELTRPIQEAMEFIRRIESQLSMLCQSPIHILNNPDGKSDNMGSSDEEQENNSGGETELPEIDPRAEDRELKNHLLKKYSGYLSSLKQELSKKKKKGKLPKEARQKLLTWWELHYKWPYPSESEKVALAESTGLDQKQINNWFINQRKRHWKPSEDMQFMVMDGLQHPHHAALYMDGHYMGDGPYRLGP

SEQ ID NO: 23345 - protein, 382 aa, Arabidopsis thaliana
MESGSNSTSCPMAFAGDNSDGPMCPMMMMMPPIMTSHQHHGHDHQHQQQEHDGYAYQSHHQQSSSLFLQSLAPPQGTKNKVASSSSPSSCAPAYSLMEIHHNEIVAGGINPCSSSSSSASVKAKIMAHPHYHRLLAAYVNCQKVGAPPEVVARLEEACSSAAAAAASMGPTGCLGEDPGLDQFMEAYCEMLVKYEQELSKPFKEAMVFLQRVECQFKSLSLSSPSSFSGYGETAIDRNNNGSSEEEVDMNNEFVDPQAEDRELKGQLLRKYSGYLGSLKQEFMKKRKKGKLPKEARQQLLDWWSRHYKWPYPSEQQKLALAESTGLDQKQINNWFINQRKRHWKPSEDMQFVVMDATHPHHYFMDNVLGNPFPMDHISSTML

SEQ ID NO: 23346 - protein, 382 aa, Arabidopsis thaliana
MESGSNSTSCPMAFAGDNSDGPMCPMMMMMPPIMTSHQHHGHDHQHQQQEHDGYAYQSHHQQSSSLFLQSLAPPQGTKNKVASSSSPSSCAPAYSLMEIHHNEIVAGGINPCSSFSSSASVKAKIMAHPHYHRLLAAYVNCQKVGAPPEVVARLEEACSSAAAAAASMGPTGCLGEDPGLDQFMEAYCEMLVKYEQELSKPFKEAMVFLQRVECQFKSLSLSSPSSFSGYGETAIDRNNNGSSEEEVDMNNEFVDPQAEDRELKGQLLRKYSGYLGSLKQEFMKKRKKGKLPKEARQQLLDWWSRHYKWPYPSEQQKLALAESTGLDQKQINNWFINQRKRHWKPSEDMQFVVMDATHPHHYFMDNVLDNPFPMDHISSTML

SEQ ID NO: 23347 - protein, 326 aa, Arabidopsis thaliana
QSHHQQSSSLFLQSLAPPQGTKNKVASSSSPSSCAPAYSLMEIHHNEIVAGGINPCSSSSSSASVKAKIMAHPHYHRLLAAYVNCQKVGAPPEVVARLEEACSSAAAAAASMGPTGCLGEDPGLDQFMEAYCEMLVKYEQELSKPFKEAMVFLQRVECQFKSLSLSSPSSFSGYGETAIDRNNNGSSEEEVDMNNEFVDPQAEDRELKGQLLRKYSGYLGSLKQEFMKKRKKGKLPKEARQQLLDWWSRHYKWPYPSEQQKLALAESTGLDQKQINNWFINQRKRHWKPSEDMQFVVMDATHPHHYFMDNVLGNPFPMDHISSTML

SEQ ID NO: 23348 - protein, 377 aa, Arabidopsis thaliana
MESGSNSTSCPMAFAGDNSDGPMCPMMMMMPPIMTSHQHHGHDHQHQQQEHDGYAYQSHHQQSSSLFLQSLAPPQGTKNKVASSSSPSSCAPAYSLMEIHHNEIVAGGINPCSSSSSSASVKAKIMAHPHYHRLLAAYVNCQKVGAPPEVVARLEEACSSAAAAAASMGPTGCLGEDPGLDQFMEAYCEMLVKYEQELSKPFKEAMVFLQRVECQFKSLSLSSPSSFSAIDRNNNGSSEEEVDMNNEFVDPQAEDRELKGQLLRKYSGYLGSLKQEFMKKRKKGKLPKEARQQLLDWWSRHYKWPYPSEQQKLALAESTGLDQKQINNWFINQRKRHWKPSEDMQFVVMDATHPHHYFMDNVLGNPFPMDHISSTML

SEQ ID NO: 23349 - protein, 397 aa, Malus x domestica
MEDYNNQMDHESSGGRGNFLYASPNLGGNYGRAASDHQMGINTFHLQSSGGGGGGGSGDQCNFQSPGTHPINVKTEATTSQHGHQKFQYNNNNNSHLVSSSRGHQPVIHQLQNNFDLLNDDHSLSSNEVEAIKAKIIAHPQYSNLLEAYMDCQRVGAPSDVVARLSVARQEFEARQRSSGTSRETSKDPELDQFMEAYYDMLVKYREELTRPIQEAMDFMRRIETQLNMLGNNNNAPPLRIFSPSEDKCEGIGSSEEEQENSGGETEVPEIDPRAEDRELKNHLLRKYSGYLSSLKQELSKKKKKGKLPKDARQKLLSWWELHYKWPYPSESEKVALAESTGLDQKQINNWFINQRKRHWKPSEDMQFMVMDGLHPQNAALYMDGHYIGDGHYRLGP

SEQ ID NO: 23350 - protein, 398 aa, Malus x domestica
MEDYNNQMDHESSGGRGNFLYASPNLGGNYGRAASDHQMGINTFHLQSSGGGGGGGSGDQCNFQSPGTHPINVKTEATTSQHGHPKFQYNNNNNNHHLVSSSRGHQPVVHQLQHNLDLQNDDHSLSSNEVEAIKAKIIAHPQYSNLVEAYMDCQRVGAPSDVVPRLSVARQEFEARQRSSGTSRETSKDPELDQFMEAYYDMLVKYREELTRPIQEAMDFMRRIETQLNMLGNNNNAPPLRIFSPSEDKCEGIGSSEDEQENSGGETEVPEIDPRAEDRELKNHLLRKYSGYLSSLKQELSKKKKKGKLPKEARQKLLSWWELHYKWPYPSESEKVALAESTGLDQKQINNWFINQRKRHWKPSEDMQFMVMDGLHPQNAALYMDGHYTGDVHYRLGP

SEQ ID NO: 23351 - protein, 381 aa, Glycine max
  unsure (1)..(381): unsure at all Xaa locations
MEEYTNNNHLSENTGPSPSTPRPNFLYSSASGGNHNHNHHQHHFPINTFHLQSGGSDHCFQSDQVSPHHSVKSEASTSQLHAPIFHYXXLMRGNLHNTMHHHHPQQQQGGSPTSSTGEVEAIKAKIIAHPQYSNLLEAYMFNLXIGAPPEVVARMAAAKQEFEARQRSSVGSRETSKDPELDQFMEAYYDMLVKYREELTRPIQEAMDFMRRIETQLNMLCNGPVRIFSDDKCEGAGSSEEDQDNSGGETELPEIDPRAEDRELKNHLLKKYSGYLSSLKQELSKKKKKGKLPKDARQKLLNWWELHYKWPYPSESEKVALAESTGLDQKQINNWFINQRKRHWKPSEDMQFMVMDGLHPQSATLYMDGHYMADGHYRLGP

SEQ ID NO: 23352 - protein, 378 aa, Glycine max
QAKAMEGSSCSNDTSYLLAFGENSGGLCPMTMMPLVTSHHATNPSNPSNNTNNNENTNCLFIPNCSNSSGTPSIMLHNNNTDDDNNKTSTNTGLGYYFMESDHHHRNNNNNGSSSSSSSSAVKAKIMAHPHYHRLLAAYVNCQKVGAPPEVVARLEEACASAVTMAGDAAAAAGSSCIGEDPALDQFMEAYCEMLTKYEQELSKPLKEAMLFLQRIECQFKNLTISSTDFACNEGAERNGSSEEDVDLHNMIDPQAEDRELKGQLLRKYSGYLGSLKQEFMKKRKKGKLPKEARQQLLEWWSRHYKWPYPSESQKLALAESTGLDQKQINNWFINQRKRHWKPSEDMQFVVMDPSHPHYYMDNVLGNPFPMDLSHPML

SEQ ID NO: 23353 - protein, 379 aa, Glycine max
MEGGSSSSNGTSYLLAFGENNSGGLCPMTMMPLVTSHHAGHHPINPSNNNNVNTNCLFIPNCSNSTGTPSIMLHNNHNNNKTDDDDNNNNTGLGYYFMESDHHHHHHGNNNNNGSSSSSSSSAVKAKIMAHPHYHRLLAAYVNCQKVGAPPEVVARLEEACASAATMAGGDAAAGSSCIGEDPALDQFMEAYCEMLTKYEQELSKPLKEAMLFLQRIECQFKNLTISSSDFASNEGGDRNGSSEEDVDLHNMIDPQAEDRDLKGQLLRKYSGYLGSLKQEFMKKRKKGKLPKEARQQLLEWWNRHYKWPYPSESQKLALAESTGLDQKQINNWFINQRKRHWKPSEDMQFVVMDPSHPHYYMDNVLGNPFPMDLSHPML

SEQ ID NO: 23354 - protein, 379 aa, Glycine max; identical to SEQ ID NO: 23353

SEQ ID NO: 23355 - protein, 379 aa, Glycine max; identical to SEQ ID NO: 23353

SEQ ID NO: 23356 - protein, 364 aa, Glycine max
  unsure (1)..(364): unsure at all Xaa locations
MGQEAMEGVISSKGMGFGENTSSSGVCPMMMMPLVTSHHVGHHPLNHPILNNPNPNEHTNTLFLPMPXXTNNNHHPNRNNHTTXNATELGYFMEIPNNNYDGGSSSPSSAVKAKIMAHPIRLELLAAYVNCQKVGAPPEVVGRLEEACASAAVIMAGGTASIGEDPALDQFMEAYCEMLIKYEQELSKPFKEAMLFLQRIECQFKSLTISSSLDTTACNEAIDRNGPSEDVDVQTNIIDPQAEDQELKGQLLRKYRGYLGSLKQEFTKKRKKGKLPKEARQQLLEWWSRHYKWPYPSESQKLALAESTGLDQKQINNWFINQRKRHWKPSEDMQFVVVDPSHPHYYMENVLGNPFPMDLSHPML

SEQ ID NO: 23357 - protein, 377 aa, Glycine max
  unsure (1)..(377): unsure at all Xaa locations
LTIHLSSLEFSTNKETKLNFGSTLWTIICSVLFLRKQXGGDXQLGTTDPSQRGFGGNSCSELSEMDMMNMETNNRKFLSLPLSNNNNNSGNAQMRSSSDNRRVPVTSNSNIAQEHHYSHHNPTDTCSVRDKIMAHPFLPRLLSSYLNCLKVGAPPEVVASLEESCAKCESFNASSGRTGGSIGEDPALDQFMEAYCEMLIKYEQELTKPFKEAMLFFSRIECQLKALAVSSDFGQXXETSSQNEVDVHENNLDSQAEDRELKVQLLRKYSGYLGSLKKEFLKKKKNGKLPKEARQQLLDWWNRHYKWPYPSESQKQALAESTGLDLKQINNWFINQRKRHWKPSEDMQFAVMDAXXNYYMENVMCKPFPMDGMPMLL

SEQ ID NO: 23358 - protein, 374 aa, Glycine max
  unsure (1)..(374): unsure at all Xaa locations
SXEGGEFHIHIDTYILFFHXGKENSELSCRDTRXPCVKPLCLHLHYSTHSNSTGSSSSSVCLRERERETTXXTLLMHRRKKIDYTIPRDNNNNSGDNXEGYLSLDSIAQEHHYSHHHNXXTDTCSVRDKIMAHPLFPRLLSSYLNCLKVGAPPEVVASLEESYAKYESFNASSGRIGGGSIGEDPALDQFMEAYCEMLIKYEQELTKPFKEAMLFFSRIECQLKALAVSSDFGQSETSSKNEVDVHENNLDSQAEDRELKVQLLRKYSGYLGSLKKEFLKKKKNGKLPKEARQQLLDWWNRHYKWPYPSESQKQALAESTGLDMKQINNWFINQRKRHWKPSEDMQFAVMDATNYYMENVMCKPFPMDSMPMLL

SEQ ID NO: 23359 - protein, 161 aa, Oryza sativa (indica cultivar-group)
MEELEGHRGEGRLPPPPPLLPFPKVSVQVYTVPSSSTAASAAAAGGARQAVAPATRDGGGRAAGVLDDPVKARIVSHPRYHRLLAAFLDCHKVGCPAEAAEEIAAAARVREARQRAAAAASRMPPAPEDPELDQFMEDYCKLLVECKEELSRPLQEAEEFL

SEQ ID NO: 23360 - protein, 164 aa, Oryza sativa (indica cultivar-group)
MEELEGHRGEGRLPPPPPLLPFPKVSVQVYTVPSSSTAASAAAAGGARQAVAPATRDGGDGGGRAAGVLDDPVKARIVSHPRYHRLLAAFLDCHKVGCPAETAEEIAAAARVREARQRAAAAASRMPPAPEDPELDQFMEDYCKLLVECKEELSRPLQEAEEFL

SEQ ID NO: 23361 - protein, 355 aa, Oryza sativa (japonica cultivar-group)
MDQSFGNLGGGGGAGGSGKAAASSFLQLPLSTAAAATAYYGTPLALHQAAAAAGPSQYHGHGHPHHGGGHHHSKHGGAGGGEISAAEAESIKAKIMAHPQYSALLAAYLDCQKVGAPPEVLERLTATAAKLDARPPGRHDARDPELDQFMEAYCNMLAKYREELTRPIDEAMEFLKRVESQLDTIAGGAHGGGAGSARLLLADGKSECVGSSEDDMDPSGRENEPPEIDPRAEDKELKFQLLKKYSGYLSSLRQEFSKKKKKGKLPKEARQKLLHWWELHYKWPYPSETEKIALAESTGLDQKQINNWFINQRKRHWKPSEDMPFVMMEGFHPQNAAALYMDGPFMADGMYRLGS

SEQ ID NO: 23362 - protein, 355 aa, Oryza sativa (japonica cultivar-group)
MDQSFGNLGGGGGAGGSGKAAASSFLQLPLSTAAAATAYYGTPLALHQAAAAAGPSQYHGHGHPHHGGGHHHSKHGGAGGGEISAAEAESIKAKIMAHPQYSALLAAYLDCQKVGAPPEVLERLTATAAKLDARPPGRHDARDPELDQFMEAYCNMLAKYREELTRPIDEAMEFLKRVESQLDTIAGGAHGGGAGSARLLLADGKSECVGSSEDDMDPSGRENEPPEIDPRAEDKELKFQLLKKYSGYLSSLRQEFSKKKKKGKLPKEARQKLLHWWELHYKWPYPSETEKIALAESTGLDQKQINNWFINQRKRHWKPSEDMPFVMMEGFPPQNAAALYMDGPFMADGMYRLGS

SEQ ID NO: 23363 - protein, 412 aa, Oryza sativa (japonica cultivar-group)
MDQSFGNLGGGGGAGGSGKAAASSFLQLPLSTAAAATAYYGTPLALHQAAAAAGPSQYHGHGHPHHGGGHHHSKHGGAGGGEISAAEAESIKAKIMAHPQYSALLAAYLDCQKVGAPPEVLERLTATAAKLDARPPGRHDARDPELDQFMEAYCNMLAKYREELTRPIDEAMEFLKRVESQLDTIAGGAHGGGAGSARLLLAGKSTNHPSPSSCSRLRFYFYLHTCSFCFFSSAAAAAADDDDLVVGGDGGGGGGGGLPHCKSECVGSSEDDMDPSGRENEPPEIDPRAEDKELKFQLLKKYSGYLSSLRQEFSKKKKKGKLPKEARQKLLHWWELHYKWPYPSETEKIALAESTGLDQKQINNWFINQRKRHWKPSEDMPFVMMEGFHPQNAAALYMDGPFMADGMYRLGS

SEQ ID NO: 23364 - protein, 355 aa, Lycopersicon esculentum
MENNNYNNHVSGENSGGQRGHFFYGGNQVLGGAAPIYGRGGDCYDPMIVKTEGGGSTSHHNHTFHYPSIIRNHHHDSTETSGGGAGAGEVIEALKAKIIAHPQCSNLLDAYMDCQKVGAPPEVAARLSAVRQEFEARQRRSLTDRDVSKDPELDQFMEAYYDMLVKYREELTRPLQEAMEFMQKIEAQLNMLGNAPVRIFNSEDKCEGVGSSEEDQDNSGGETELPEIDPRAEDRELKNHLLRKYSGYLSSLKQELSKKKKKGKLPKDARQKLITWWELHYKWPYPSESEKVALAESTGLDQKQINNWFINQRKRHWKPSEDMQFMVMDGLHPQSAAALYMEGHYMGEGPFRLGQ

SEQ ID NO: 23365 - protein, 355 aa, Lycopersicon esculentum
MEGGSSGNTSTSCLMMMGYGDHENNNNNNGNGNGNGNGNVTICAPPMMMMMPPPPPSLTNNNNAETSNNNILFLPFMDNNNNNNPQEDNNSSSSSIKSKIMAHPHYHRLLTAYLNCQKIGAPPEVVARLEEICATSATMGRSSSSSGGGIIGEDPALDQFMEAYCEMLTKYEQELSKPFKEAMVFLSRIECQFKALTLAPNSSHESALGEAMDRNGSSDEEVDVNNSFIDPQAEDRELKGQLLRKYSGYLGSLKQEFMKKRKKGKLPKEARQQLVDWWLRHIKWPYPSESQKLALAESTGLDQKQINNWFINQRKRHWKPSEDMQFVVMDAAHPHYYMDNVLANHFPMDMTPSLL

SEQ ID NO: 23366 - protein, 354 aa, Lycopersicon esculentum
MEGGSSGNTSTSCLMMMGYGDHENNNNNNGNGNGNGNGNVTICAPPMMMMMPPPPPSLTNNNNAETSSNNILFLPFMDNNNNNPQEDNNSSSSSIKSKIMLNPHYHRLLTAYLNCQKIGAPPEVVARLEEICATSATMGRSSSSSGGGIIGEDPALDQFMEAYCEMLTKYEQELSKPFKEAMVFLSRIECQFKALTLAPNSSHESALGEAMDRNGSSDEEVDVNNSFIDPQAEDRELKGQLLRKYSGYLGSLKQEFMKKRKKGKLPKEARQQLVDWWLRHIKWPYPSESQKLALAESTGLDQKQINNWFINQRKRHWKPSEDMQFVVMDAAHPHYYMDNVLANHFPMDMTPSLL

SEQ ID NO: 23367 - protein, 356 aa, Nicotiana tabacum
MENNYNQLGENSSQRGNNFLYGGIPLLSSPNSSYLWKNKWRRRRSDCYDQSQAVVHPIVKTEGGSSTSHHHHTFQYPSIIRSGYHHQTVQNHHESESSGSEVDALKAKIIAHPQCSNLLDAYMDCQKVGAPPEVVARLSAVRQEFEVRQRDSSTDRDVSKDPELDQFMEAYYDMLVKYREELTRPLHEAMDFMRKIETQLNMLEDKCEGVGSSEEEQDNSGGETEIPEIDPRAEDRELKNHLLRKYSGYLSSLKQELSKKKKKGKLPKDARQKLLSWWELHYKWPYPSESEKVALAETTGLDQKQINNWFINQRKRHWKPSEDMQFMVMDGLHPQNAAALYMEGHYMGEGPFRLGQ

SEQ ID NO: 23368 - protein, 342 aa, Nicotiana tabacum
MGGGGSSGNTSSCLMGYGDDNNNNNSGNAALCPPPMMMPPPPINNNNGESSNNIGGNNNNNILFLPFMANNNNNPHEDANCSSSSSIKSKIMAHPHYPRLLSAYVNCQKIGAPPEVVARLEEVCATSATIGRNSGGIIGEDPALDQFMEAYCEMLTKYEQELSKPFKEAMVFLSRIECQFKALTLTSSSESVAALGEAIDRNGSSEEEVDVNNGFIDPQAEDQELKGQLLRKYSGYLGSLKQEFMKKRKKGKLPKEARQQLLDWWTRHYKWPYPSESQKLALAESTGLDQKQINNWFINQRKRHWKPSEDMQFVVMDAAHPHYYMDNVLGNPFPMDITPTLL

SEQ ID NO: 23369 - protein, 343 aa, Nicotiana tabacum
MEGGGSSGNTSCLMGYNGDDNNNNSGNAALCPPPMMMMMMPPPINNNNAESSNNIGGNNNNNILFLPFMDNNNNNPHEDANCSSTSIKSKIMAHPHYPRLLSAYVNCQKIGAPPEVVARLEEVCATSATIGRNSGGIIGEDPALDQFMEAYCEMLTKYEQELSKPFKEAMVFLSRIECQFKALTLTSSSESVAALGEAIDRNGNGSSEEVDVNNGFIDLQAEDQELKGQLLRKYSGYLGSLKQEFMKKRKKGKLPKEARQQLLDWWTRHYKWPYPSESQKLALAESTGLDQKQINNWFINQRKRHWKPSEDMQFVVMDAAHPHYYMDNVLGNPFPMDITPTLL

SEQ ID NO: 23370 - protein, 358 aa, Helianthus annuus
MEDYLGQNSSSSNTGTTSTTFLYGSGGVAPDTSCLYGRGGNESDPGHGGFHHPDQYHHPMVKIETEKFHNYPPSMVNFHNEDEALKAKIISHPHYSNLLQAYMDCQKVGAPPEVVGRLTAVRQEYEARQRANLGCRENYKDPELDQFMEAYYDMLIKYKEELTRPIQEAMEFMRRIESQLSTLTISSSSSSSPAGRIFISPDESKCEVIGSSDEEQENTSGGETEVAEIDPRAEDRELKNHLLRKYSGYLSSLKQELSKKKKKGKLPKEARQKLLSWWELHYKWPYPSESEKVALAESTGLDQKQINNWFINQRKRHWKPSEDMQFMVMDGLHPQNVATALYMGDHHYMGDGPYRLGP

SEQ ID NO: 23371 - protein, 362 aa, Helianthus annuus
MESDGDGGGTSSCLMSFGDTTNNINNNSSNNNNSNNNIGSLCLPPNPPGAYNTTTNNNNLIFSDHHPSAMMLEDNNININDGVGLAFMNPSSSVKAKIMSHPHYPRLLSAYLNCQKIGAPPEVVERLEEACRASVVAAMSSCSGGAGTSDGSGGGMNMIIGQDPALDQFMEAYCEMLIKYEQELSKPFKEAMLFLSRIESQFKAISISTSDSAGGEGGMDKNGSSEEEVDVNNNLIDPQAEDRELKGQLLRKYSGYLGSLKQEFMKKRKKGKLPKEARQQLLDWWTRHYKWPYPSEAQKLALAESTGLDQKQINNWFINQRKRHWKPSEDMQFVVMDAAHPHYFMENMNILGNPYPMDVSLL

SEQ ID NO: 23372 - protein, 189 aa, Helianthus annuus
CEMLIKYEQELSKPFKEAMLFLSRMESQFKAITFSNSDSGCGEGGMDRNGSSEEELDVDMNNGVVDPQAEDRELKGQLLRKYSGYLGSLKQEFMKKRKKGKLPKEARQQLLDWWTRHYKWPYPSEAQKLALAESTGLDQKQINNWFINQRKRHWKPSEDMQFVVMDAAHPHYFIDNIFGNPYPMDVSLL

SEQ ID NO: 23373 - protein, 355 aa, Oryza sativa; identical to SEQ ID NO: 23361

SEQ ID NO: 23374 - protein, 357 aa, Oryza sativa
MDQSFGNLGGGGAGGSGKAAASSFLQLPLSTAAAATAYYGTPLALHQAAAAAGPSQYHGHGHPHHGGGHHHSKHGGAGGGEISAAEAESIKAKIMAHPQYSALLAAYLDCQKVGAPPEVLERLTATAAKLDARPPGRHDARDPELDQFMEAYCNMLAKYREELTRPIDEAMEFLKRVESQLDTIAGGGHGGSGGGAGSARLLLADGKSECVGSSEDDMDPSGRENEPPEIDPRAEDKELKFQLLKKYSGYLSSLRQEFSKKKKKGKLPKEARQKLLHWWELHYKWPYPSETEKIALAESTGLDQKQINNWFINQRKRHWKPSEDMPFVMMEGFHPQNAAALYMDGPFMADGMYRLGS

SEQ ID NO: 23375 - protein, 357 aa, Oryza sativa; identical to SEQ ID NO: 23374

SEQ ID NO: 23376 - protein, 231 aa, Physcomitrella patens
  unsure (1)..(231): unsure at all Xaa locations
RSYVGVLTKFAEDLEEPFNKFIQFTDNTSKALEEICGHYVDTTPDEDNCGFDIGPLEYGAQEGDDLDTLGDENVMYPLDIDESVIVDPMASDEDIKKALRKKYGRHIGELKAEFNRVRKKGKLPTSARTILKDWFNRHSHWPYPSEMEKQYLQRICGLNLKQINNWFINERKRHWSCEGKCMHPNAKFYGTSNGQCRGHLEXEQSNRLQXSSEETIYVKCSHAALIFEVSM

SEQ ID NO: 23377 - protein, 322 aa, Ipomoea nil
MMDETTYGFPSTSCDYADKALMSPDNNNLMMMDYPYAYNYNYNYHPGGAAADTIPFCGASTEVAAATTTCVDNEDDDVSSVMIKAKIASHPCYPKLLHAYIDCQKVGAPPEIATVLDEIRREDDELRKRGGGGAVSSCLGADPELDEFMETYYDMLVKYKSDLSKPFHEATTFLNTIETQLSNLCKDESGAVSSDEEDSGGETDIQQESITKTEERQLKNTLLRKYGSHLSSLKLEFSKKKKKGKLPKEARQTLLDWWSDHYKWPYPTEADKIALAESTGLDQKQINNWFINQRKRHWKPSESMQLAVMENLTGQFFSSDDS

SEQ ID NO: 23378 - protein, 327 aa, Arabidopsis thaliana
MDGMYNFHSAGDYSDKSVLMMSPESLMFPSDYQALLCSSAGENRVSDVFGSDELLSVAVSALSSEAASIAPEIRRNDDNVSLTVIKAKIACHPSYPRLLQAYIDCQKVGAPPEIACLLEEIQRESDVYKQEVVPSSCFGADPELDEFMETYCDILVKYKSDLARPFDEATCFLNKIEMQLRNLCTGVESARGVSEDGVISSDEELSGGDHEVAEDGRQRCEDRDLKDRLLRKFGSRISTLKLEFSKKKKKGKLPREARQALLDWWNLHYKWPYPTEGDKIALADATGLDQKQINNWFINQRKRHWKPSENMPFAMMDDSSGSFFTEE

SEQ ID NO: 23379 - protein, 324 aa, Arabidopsis thaliana
MYNFHSAGDYSDKSVLMMSPESLMFPSDYQALLCSSAGENRVSDVFGSDELLSVAVSALSSEAASIAPEIRRNDDNVSLTVIKAKIACHPSYPRLLQAYIDCQKVGAPPEIACLLEEIQRESDVYKQEVVPSSCFGADPELDEFMETYCDILVKYKSDLARPFDEATCFLNKIEMQLRNLCTGVESARGVSEDGVISSDEELSGGDHEVAEDGRQRCEDRDLKDRLLRKFGSRISTLKLEFSKKKKKGKLPREARQALLDWWNLHYKWPYPTEGDKIALADATGLDQKQINNWFINQRKRHWKPSENMPFAMMDDSSGSFFTEE

SEQ ID NO: 23380 - protein, 326 aa, Arabidopsis thaliana
MYNFHSAGDYSDKSVLMMSPESLMFPSDYQALLCSSAGENRVSDVFGSDELLSVAVSALSSEAASIAPEIRRNDDNVSLTVIKAKIACHPSYPRLLQAYIDCQKKQVGAPPEIACLLEEIQRESDVYKQEVVPSSCFGADPELDEFMETYCDILVKYKSDLARPFDEATCFLNKIEMQLRNLCTGVESARGVSEDGVISSDEELSGGDHEVAEDGRQRCEDRDLKDRLLRKFGSRISTLKLEFSKKKKKGKLPREARQALLDWWNLHYKWPYPTEGDKIALADATGLDQKQINNWFINQRKRHWKPSENMPFAMMDDSSGSFFTEE

SEQ ID NO: 23381 - protein, 344 aa, Arabidopsis thaliana
MYNFHSAGDYSDKSVLMMSPESLMFPSDYQALLCSSAGENRVSDVFGSDELLSVAVSALSSEAASIAPEIRRNDDNVSLTVIKAKIACHPSYPRLLQAYIDCQKVGAPPEIACLLEEIQRESDVYKQEVVPSSCFGADPELDEFMETYCDILVKYKSDLARPFDEATCFLNKIEMQLRNLCTGVESARGVSGGMSPHGDKTISPLLTNDNGEDGVISSDEELSGGDHEVAEDGRQRCEDRDLKDRLLRKFGSRISTLKLEFSKKKKKGKLPREARQALLDWWNLHYKWPYPTEGDKIALADATGLDQKQINNWFINQRKRHWKPSENMPFAMMDDSSGSFFTEE

SEQ ID NO: 23382 - protein, 311 aa, Arabidopsis thaliana
MDRMCGFRSTEDYSEKATLMMPSDYQSLICSTTGDNQRLFGSDELATALSSELLPRIRKAEDNFSLSVIKSKIASHPLYPRLLQTYIDCQKVGAPMEIACILEEIQRENHVYKRDVAPLSCFGADPELDEFMETYCDILVKYKTDLARPFDEATTFINKIEMQLQNLCTGPASATALSDDGAVSSDEELREDDDIAADDSQQRSNDRDLKDQLLRKFGSHISSLKLEFSKKKKKGKLPREARQALLDWWNVHNKWPYPTEGDKIALAEETGLDQKQINNWFINQRKRHWKPSENMPFDMMDDSNETFFTEE

SEQ ID NO: 23383 - protein, 310 aa, Arabidopsis thaliana
MDRMCGFRSTEDYSEKATLMMPSDYQSLICSTTGDNQRLFGSDELATALSSELLPRIRKAEDNFSLSVIKSKIASHPLYPRLLQTYIDCQKVGAPMEIACILEEIQRENHVYKRDVAPLSCFGADPELDEFMETYCDILVKYKTDLARPFDEATTFINKIEMQLQNLCTGPASATALSDDGAVSSDEELREDDDIAADDSQQRSNDRDLKDQLLRKFGSHISSLKLEFSKKKKKGKLPREARQALLDWWNVHNKWPYPTEGDKISLAEETGLDQKQINNWFINQRKRHWKPSENMPFDMMDDSNETFFTE

SEQ ID NO: 23384 - protein, 311 aa, Arabidopsis thaliana
MDRMCGFRSTEDYSEKATLMMPSDYQSLICSTTGDNQRLFGSDELATALSSELLPRIRKAEDNFSLSVIKSKIASHPLYPRLLQTYIDCQKVGAPMEIACILEEIQRENHVYKRDVAPLSCFGADPELDEFMETYCDILVKYKTDLARPFDEATTFINKIEMQLQNLCTGPASATALSADDGAVSSDEELREDDDIAADDSQQRSNDRDLKDQLLRKFGSHISSLKLEFSKKKKKGKLPREARQALLDWWNVHNKWPYPTEGDKISLAEETGLDQKQINNWFINQRKRHWKPSENMPFDMMDDSNETFFTE

SEQ ID NO: 23385 - protein, 294 aa, Brassica napus
MQEAALGMIGATVGGGGDGDAAVVAEQNRQMKGEIATHPMYDQLLAAHVACLRVATPIDQLPIIEAQLSHSHHLLRSYASTAVGFSHHDRQELDNFLAQYVMVLCSFKEQLQQHVRVHAVEAVMACREIENNLHSLTGATLGEGSGATMSEDEDDLQMDFSSDNSGVDFSGGHDMTGFGPLLPTESERSLMERVRQELKLELKQGFKSRIEDVREEIMRKRRAGKLPGDTTTVLKNWWQQHCKWPYPTEDDKAKLVEETGLQLKQINNWFINQRKRNWHNNSHSLTSLKSKRKH

SEQ ID NO: 23386 - protein, 164 aa, Oryza sativa (indica cultivar-group)
MEDLYSIHPGISRGGGGGGGGAASEASGVAGGGSSPPHPPPPATTAAAADLTELMKAQIAGHPSYPSLLSAYIECRKVGAPPEVTTLLEEIGREGRGGGGGATAGGEIGLDPELDEFMETYCRVLERYKEELTRPFDEAASFLTGIHTQLASLCGGAPPPTDNS

SEQ ID NO: 23387 - protein, 320 aa, Lycopersicon esculentum
MDDEIMYGFNSTRDDYADKALMSPENLMMQTEYNNFHNYTNSSIMFGSDPIQLSSEQTLQNNIYRGNCCGGSGSGGDNNNNNDEDGSNIIKAKILSHPYYPKLLNAYIDCQKVGAPASIVNLLEEIRQQNDFRKPNATCLCIGADPELDEFMETYCDILLKYKSDLSRPFDEATTFLNNIEMQLGNLCKDDDEEEEEELSCGDASSSMRRSEDNELKDRLLRKFGSHLSSLKLEFSKKKKKGKLPKEAREMLLAWWYDHFRWPYSTEADKNSLAESTGLDPKQINNWFINQRKRHWKPSENMQLAVMDNLSAQFFSSDVD

SEQ ID NO: 23388 - protein, 319 aa, Nicotiana tabacum
MDDEIYGFHSTSEYADKALMSPENLMMQTEYNMTYHNYNTLSTPPMMFGSDDVQLSSEAANSENNNIHHQIRGSCSRRDDTEDASNIIKAKVVSHPFYPKFVRAYIDCQKVGAPPEIATVLEEIRQQNDFRKPNATSICIGADPELDEFMETYCDILVKYKSDLSRPFDEATTFLSKIELQLSNLCKDDGGVSSDEELSCGEVEGQDASQRSEDNELKDRLLRKFGSHLSTLKLEFSKKKKKGKLPKEARQMLLAWWNDHYRWPYPTEADKNSLAESTGLDPKQINNWFINQRKRHWKPSENMQLAVMDNLSGQFFSDD

SEQ ID NO: 23389 - protein, 322 aa, Nicotiana tabacum
MEKMYEFVSSSSDVYSVEDNLQPPYFGSPPAFCDGLAPMGFGSGNMSWACPETSAANLVVDKSGTSSSNLQLEDHPETDIRAKISSHPLYPKLLRTYIDCHKVGAPSDEIVDMLDNINIVHENDLSRRSNRLSDDSELDAFMETYCDVLAKFKSDLERPFNEATTFLNDIETQLTNLCAAPATTISNISDEGAAGTEEEEEVADTSGGGGNTNDMCRSENEIKDKLMRKYSGYISSLKQEFSKKNKKGKLPREARQILLNWWTTHYKWPYPTEGEKICLAESTGLDPKQINNWFINQRKRHWKPSENMQYAVMESIYGHFSE

SEQ ID NO: 23390 - protein, 296 aa, Zea mays
  unsure (1)..(296): unsure at all Xaa locations
MEDLYSIHPGISRVVGGAASEASVXAGAGAGGPSPSDLTELMKAQIASHPRYPSLLSAYIECRKVGAHPHVTSLLEEVSRERRPDAGAGEIGVDPELDEFMDAYCRVLVRYKEELTRPFDEAASFLSSIQAQLSDLCSGGSSPAATATHSDDMMGSSEDEQCSGDTDVPDMGQEHSSHLGDHELKEMLLKKYSGCLSRLRSEFLKKRKKGKLPKDARTVLLEWWNTHYRWPYPTEEDKVRLAAMTGLDPKQINNWFINQRKRHWKPSEDMRFALMEGVAGGSSGTTLYFDTGTIGP

SEQ ID NO: 23391 - protein, 295 aa, Zea mays
MEDLYSIHPGISRVVGGAASEASVAGAGAGGPSPSDLTELMKAQIASHPRYPSLLSAYIECRKVGAHPHVTSLLEEVSRERRPDAGAGEIGVDPELDEFMDAYCRVLVRYKEELTRPFDEAASFLSSIQAQLSDLCSGGSSPAATATHSDDMMGSSEDEQCSGDTDVPDMGQEHSSHLGDHELKEMLLKKYSGCLSRLRSEFLKKRKKGKLPKDARTVLLEWWNTHYRWPYPTEEDKVRLAAMTGLDPKQINNWFINQRKRHWKPSEDMRFALMEGVAGGSSGTTLYFDTGTIGP

SEQ ID NO: 23392 - protein, 297 aa, Zea mays
MEDLYSIHPGISRVVGGAASEASVAGAGAGGPSPSDLTELMKAQIASHPRYPSLLSAYIECRKVGAHPHVTSLLEEVSRERRPGPGAGAGEIGVDPELDEFMDAYCRVLVRYKEELTRPFDEAASFLSSIQAQLSDLCSGGSSPAATATHSDDMMGSSEDEQCSGDTDVPDMGQEHSSHLGDHELKEMLLKKYSGCLSRLRSEFLKKRKKGKLPKDARTVLLEWWNTHYRWPYPTEEDKVRLAAMTGLDPKQINNWFINQRKRHWKPSEDMRFALMEGVAGGSSGTTLYFDTGTIGP

SEQ ID NO: 23393 - protein, 300 aa, Zea mays
  unsure (1)..(300): unsure at all Xaa locations
MEDLYSIHPGISRHGAAATSEASGVAGGPGSPPPPPPPAADLTELVKAQIAGHPRYPSLLSAYIDCRKVGAPSEVATLLEEIGRERXXAAASAGGEVVGMDPELDEFMETYCRLLERYKEELSRPFDEAASFLSSVRTQLSSLCGGAXXSLSDEMVESSEDEPCSGDTDATTDPGQEHSSRLADRELKEMLLKKYSGCLSRLRSEFLKKRKKGKLPKDARSALMDWWNTHYRWPYPTEEDKVRLAAMTGLDPKQINNWFINQRKRHWKPSEDMRFALMEGGVSGSSSGTTLYFDTGTIGP

SEQ ID NO: 23394 - protein, 300 aa, Zea mays
  unsure (1)..(300): unsure at all Xaa locations
MEDLYSIHPGISRHGAAATSEASGVAGGPGSPPPPPPPAADLTELVKAQIAGHPRYPSLLSAYIDCRKVGAPSEVATLLEEIGRERXXAAASAGGEVVGMDPELDEFMETYCRLLERYKEELSRPLDEAASFLSNVRTQLSSLCGGAXXSLSDEMVESSEDEPCSGDTDATTDPGQEHSSRLADRELKEMLLKKYSGCLSRLRSEFLKKRKKGKLPKDARSALMDWWNTHYRWPYPTEEDKVRLAAMTGLDPKQINNWFINQRKRHWKPSEDMRFALMEGGVAGSSSGTTLYFDTGTIGP

SEQ ID NO: 23395 - protein, 309 aa, Zea mays
  unsure (1)..(309): unsure at all Xaa locations
MEDLYSIHPGISRAGGAATAASEVSGVAGGPGSPPPPPSQPPPPPPADLTELVKAQIAGHPRYPSLLSAYIECRKVGAPPEVATLLEEIGRERXXAAASAGGEVGLDPELDEFMEAYCRVLERYKEELSRPFDEAASFLSSVRTQLSSLCXXPPPRSQLYEMVGSSEEDEACSGGDTEATEPGQQEHSSRLADHELKEMLLKKYSGCLSRLRSEFLKKRKKGKLPKDARSALMDWWNTHYRWPYPTEEDKVRLAAATGLDPKQINNWFINQRKRHWKPSEDMRFALMEGVTGGASSGTTLYFDTGTIGP

SEQ ID NO: 23396 - protein, 302 aa, Zea mays
  unsure (1)..(302): unsure at all Xaa locations
MEDLYSIHPGISRHXGGGXXSEASGVAGGPGSPPPPPPPAADLTELVKAQIAGHPRYPSLLSAYIDCRKVGAPSEVATLLEEIGRERXXAAASAGGEVVGMDPELDEFMETYCRLLERYKEELSRPLDEAASFLSNVRTQLSSLCGGAASLSDENEMVESSENEPCSGDTDATTDPGQEHSSRLADRELKEMLLKKYSGCLSRLRSEFLKKRKKGKLPKDARSALMDWWNTHYRWPYPTEEDKVRLAAMTGLDPKQINNWFINQRKRHWKPSEDMRFALMEGGVAGSSSGTTLYFDTGTIGP

SEQ ID NO: 23397 - protein, 395 aa, Neurospora crassa
MATSFYHHPPHHRPQTMHGLNVSSSHNDPRSLPSPGSALPPIRSIIPDFDKLDMDYGRRQSQAQKDTIDGGNSQGYTTDRLPTTGSSPSINVFSQHSHGQQDSGARTYLDGPLPRLPPSNAFAQHNGYHQNSEPRRGYPQYGQHQPIYRQDSYPPHGYPQDSYYPPLEHRHGPFPQPGSQQNLYEQRARSERLHYAHPWGGHSDSAVSPRGGDGGKNKRRGNLPKEVTEKLYAWLYGHLNHPYPTEDEKQKMMRETNMQMNQISNWFINARRRKVPLLIEQAKAETEAAKHYRPNSSPIARRTRPVSVSHTRHYSRSGPGRGVPSRRSVSVEPSINHLLNCPESDADVRPPQYATPMSDRGVLDYSSRESSESYEMDSRYQSYGHGHGHGHHASI

SEQ ID NO: 23398 - protein, 286 aa, Dendrobium grex Madame Thong-IN
MDEMYSIPPDSTFAAADDLHGLIAASGYGAAAAAAAAEEEMKARIASHPRYPHLLEAYIDCQKVGAPPDIASLLEEIRRENAGGERLASSSVILGSDPELDEFMEMYCDVLVKYRRDLERPFDEATAFLNTMEVQLSDLCKPTCRAALGPYVSDEAVGSSDEELSGGEGEAPESHLKGEERDLKEKLLRKYSGYLSSLKQEFSKKKKKGKLPKEARQILFEWWTAHYKWPYPTEADKIALAEATGLDQKQINNWFINQRKRHWKPAENMHFSVMDNSSTSSLFADD

SEQ ID NO: 23399 - protein, 382 aa, Homo sapiens
PDERKVPLASQYDELPHYPGIVDGPAALASFPETVPAVPGPYGPHRPPQPLPPGLDSDGLKREKDEIYGHPLFPLLALVFEKCELATCSPRDGAGAGLGTPPGGDVCSSDSFNEDIAAFAKQVRSERPLFSSNPELDNLMIQAIQVLRFHLLELEKVHDLCDNFCHRYITCLKGKMPIDLVIEDRDGGCREDFEDYPASCPSLPDQNNMWIRDHEDSGSVHLGTPGPSSGGLASQSGDNSSDQGDGLDTSVASPSSGGEDEDLDQERRRNKKRGIFPKVATNIMRAWLFQHLSHPYPSEEQKKQLAQDTGLTILQVNNWFINARRRIVQPMIDQSNRTGQGAAFSPEGQPIGGYTETQPHVAVRPPGSVGMSLNLEGEWHYL

SEQ ID NO: 23400 - protein, 204 aa, Homo sapiens
MWIRDHEDSGSVHLGTPGPSSGGLASQSGDNSSDQGDGLDTSVASPSSGGEDEDLDQERRRNKKRGIFPKVATNIMRAWLFQHLSHPYPSEEQKKQLAQDTGLTILQVNNWFINARRRIVQPMIDQSNRTGQGAAFSPEGQPIGGYTETQPHVAVRPPDPASGCDPQPHTCLWFPPGPPASGPHLQRPLCSMPTSLGPCWDMGA

SEQ ID NO: 23401 - protein, 435 aa, Homo sapiens
MATQTLSIDSYQDGQQMQVVTELKTEQDPNCSEPDAEGVSPPPVESQTPMDVDKQAIYRHPLFPLLALLFEKCEQSTQGSEGTTSASFDVDIENFVRKQEKEGKPFFCEDPETDNLMVKAIQVLRIHLLELEKVNELCKDFCSRYIACLKTKMNSETLLSGEPGSPYSPVQSQQIQSAITGTISPQGIVVPASALQQGNVAMATVAGGTVYQPVTVVTPQGQVVTQTLSPGTIRIQNSQLQLQLNQDLSILHQDDGSSKNKRGVLPKHATNVMRSWLFQHIGHPYPTEDEKKQIAAQTNLTLLQVNNWFINARRRILQPMLDSSCSETPKTKKKTAQNRPVQRFWPDSIASGVAQPPPSELTMSEGAVVTITTPVNMNVDSLQSLSSDGATLAVQQVMMAGQSEDESVDSTEEDAGALAPAHISGLVLENSDSLQ

SEQ ID NO: 23402 - protein, 436 aa, Homo sapiens
MMATQTLSIDSYQDGQQMQVVTELKTEQDPNCSEPDAEGVSPPPVESQTPMDVDKQAIYRHPLFPLLALLFEKCEQSTQGSEGTTSASFDVDIENFVRKQEKEGKPFFCEDPETDNLMVKAIQVLRIHLLELEKVNELCKDFCSRYIACLKTKMNSETLLSGEPGSPYSPVQSQQIQSAITGTISPQGIVVPASALQQGNVAMATVAGGTVYQPVTVVTPQGQVVTQTLSPGTIRIQNSQLQLQLNQDLSILHQDDGSSKNKRGVLPKHATNVMRSWLFQHIGHPYPTEDEKKQIAAQTNLTLLQVNNWFINARRRILQPMLDSSCSETPKTKKKTAQNRPVQRFWPDSIASGVAQPPPSELTMSEGAVVTITTPVNMNVDSLQSLSSDGATLAVQQVMMAGQSEDESVDSTEEDAGALAPAHISGLVLENSDSLQ

SEQ ID NO: 23403 - protein, 436 aa, Homo sapiens [sequence omitted]

SEQ ID NO: 23404 - protein, 435 aa, Homo sapiens
MATQTLSIDSYQDGQQMQVVTELKTEQDPNCSEPDAEGVSPPPVESQTPMDVDKQAIYRHPLFPLLALLFEKCEQSTQGSEGTTSASFDVDIENFVRKQEKEGKPFFCEDPETDNLMVKAIQVLRIHLLELEKVNELCKDFCSRYIACLKTKMNSETLLSGEPGSPYSPVQSQQIQSAITGTISPQGIVVPASALQQGNVAMATVAGGTVYQPVTVVTPQGQVVTQTLSPGTIRIQNSQLQLQLNQDLSILHQDDGSSKNKRGVLPKHATNVMRSWLFQHIGHPYPTEDEKKQIAAQTNLTLLQVNNWFINARRRILQPMLDSSCSETPKTKKKTAQNRPVQRFWADSIASGVAQPPPSELTMSEGAVVTITTPVNMNVDSLQSLSSDGATLAVQQVMMAGQSEDESVDSTEEDAGALAPAHISGLVLENSDSLQ

SEQ ID NO: 23405 - protein, 405 aa, Homo sapiens
MMATQTLSIDSYQDGQQMQVVTELKTEQDPNCSEPDAEGVSPPPVESQTPMDVDKQAIYRHPLFPLLALLFEKCEQSTQGSEGTTSASFDVDIENFVRKQEKEGKPFFCEDPETDNLMVKAIQVLRIHLLELEKVNELCKDFCSRYIACLKTKMNSETLLSGEPGSPYSPVQSQQIQSAITGTISPQGIVVPASALQQGNVAMATVAGGTVYQPVTVVTPQGQVVTQTLSPGTIRIQNSQLQLQLNQDLSILHQDDGSSKNKRGVLPKHATNVMRSWLFQHIGHPYPTEDEKKQIAAQTNLTLLQVNNWFINARRRILQPMLDSSCSETPKTKKKTAQNRPVQRFWPDSIASGVAQPPPSELTMSEGTGGRPRPDMVDHGVGIMNKRPGSGLLAVSHRARPRMTS

SEQ ID NO: 23406 - protein, 358 aa, Ipomoea nil
MDELYGIHSVLAPSNAPSNNNNNVFSLGVDDIHHHHNHHHHQSSMMNGGIVISGDEGQLQGQHHHHHHLLVTSSNDNYYNSDENSKGGGGGVEMMSDVVKAQIASHPLYPNLVSAYIQCRKVAAPPEMAALLEELSKVTQPITTAEIGADPELDEFMESYCEVLYKYKEELSKPFDEAKTFLSSIESQLSNLCKDTFPTTSFNSYHSGDEAGGTSEEDLSCGEVEVAESQEHLNNNSEGDQQIKEMLMRKYSGYLSSLRKEFLKKRKKGKLPKDARVALLDWWNSHYRWPYTTEEEKNKLSEATGLDQKQINNWFINQRKRHWRPSEDMRFALMEGVSGDVAGSMFFDAGGGTGNLGI

SEQ ID NO: 23407 - protein, 301 aa, Oryza sativa (japonica cultivar-group)
MEDLYSIHPGISRVGGAASEASGVGVVVGGGGGSSSSDLTELMKAQIAGHPRYPTLLSAYIECRKVGAPPEVASLLKEIGRERRAGGGGGGAGQIGVDPELDEFMEAYCRVLVRYKEELSRPFDEAASFLSSIQTQLSNLCSGATSPPATTATHSDEMVGSSDEDQCSGETDMLDIGQEQSSRLADHELKEMLLKKYSGCLSRLRSEFLKKRKKGKLPKDARSALLEWWNTHYRWPYPTEEDKLRLAARTGLDPKQINNWFINQRKRHWKPSDGMRFALMEGVAGGSSGTTLYFDTGTIGP

SEQ ID NO: 23408 - protein, 335 aa, Lycopersicon esculentum
MMDELSKLHSAIVCSHSRRQQEVEVEAEAGPTIINNTTTSFAAVHHHYCQLEAAVAADHNHHQNNTKSTTNMSDLIKAQIANHPLYPNLLSAYLQCRKVGAPQEMTSILDEISKENNLISSSRHSSEIGADPELDEFMESYCAVLVKYKEEFSKPFDEATSFLSNIESQLSSLCKDNLITSTSFNNYISDEAGGSSDEDLGCEEMEAADSQESPANCEGDNELKEMLMRKYSGYLSSLRKEFLKKRKKGKLPKEARIVLLDWWKNHYRWPYPTEEEKNRLSEMTGLDQKQINNWFINQRKRHWRPSEDMKFALMEGVSAGSMYFDGSGGTGNIGT

SEQ ID NO: 23409 - protein, 327 aa, Nicotiana tabacum
MMDELSKLHSAIACSSNNNHVVGVLEHITGQQQEGPINNSSVDNNLEKASLEMSDLIKAQIANHPLYPNLLSAYLQCRKVGAPQEMASILEEISKENHLISSGHNTEIGTDPELDDFMESYCAVLLKYKEELSKPFDEATTFLNNIESQLSSLCKENLTTTTTTTTSFNSNNNYLSDEAGGTSDEDLCCGEMEAADSTQESPANREGDNELKETLMRKYSGYLSSLRKEFLKKRKKGKLPKDARTALLEWWNTHYRWPYPTEEEKNRLSEITGLDPKQINNWFINQRKRHWRPSEDMKYALMEGVSSGSIAGSMYFDGAGGTGSIGT

SEQ ID NO: 23410 - protein, 311 aa, Oryza sativa
MEDLYSIHPGISRGGGGGGGGAASEASGVAGGGSSPPHPPPPATTAAAADLTELMKAQIAGHPSYPSLLSAYIECRKVGAPPEVTTLLEEIGREGRGGGGGATAGGEIGLDPELDEFMETYCRVLERYKEELTRPFDEAASFLTGIHTQLASLCGGAPPPTDNSDEMVGSSEDEPCSGDADAADFGQEHSSRLADHELKEMLLKKYSGCLSRLRSEFLKKRKKGKLPKDARSALMDWWNTHYRWPYPTEEDKVRLAAMTGLDPKQINNWFINQRKRHWKPSEDMRFALMEGVTGGSSSGTTLYFDTGTIGP

SEQ ID NO: 23411 - protein, 311 aa, Oryza sativa; identical to SEQ ID NO: 23410

SEQ ID NO: 23412 - protein, 301 aa, Oryza sativa; identical to SEQ ID NO: 23407

SEQ ID NO: 23413 - protein, 301 aa, Oryza sativa
MEDLYSIHPGISRVGGAASEASGVGVVVGGGGGSSSSDLTELMKAQIAGHPRYPTLLSAYIECRKVGAPPEVASLLKEIGRERRAGGGGGGAGQIGVDPELDEFMEAYCRVLVRYKEELSRPFDEAASFLSSIQTQLSNLCSGATSPPATTATHSDEMVGSSDEDQCSGETDMLDIGQEQSSRLADHELKEMLLKKYSGCLSRLRSEFLKKRKKGKLPKDARSALLEWWNTHYRWPYPTEEDKLRLAARTGLDPKQINNWFINQRKRHWKPSDGMRFAFMEGVAGGSSGTTLYFDTGTIGP

SEQ ID NO: 23414 - protein, 140 aa, Triticum aestivum
  unsure (1)..(140): unsure at all Xaa locations
XDASGRENEPPEIDPRAEDKELKYQLLKKYSGYLSSLRQEFSKKKKKGKLPKEARQKLLHWWELHYKWPYPSETEKIALAESTGLDQKQINNWFINQRKRHWKPSEDMPFVMMEGFHPQNAAALYMDGQFMADGMYSLGS

SEQ ID NO: 23415 - protein, 142 aa, Triticum aestivum
  unsure (1)..(142): unsure at all Xaa locations
XCVEEIDPSAEDKELKHQLLRKYGGYVGSLRQEFCKRRKKGKLPKEARQKLLHWWELHSKWPYPSETEKIALAESTGLDQKQINNWFINQRKRHWKPAPEDMPFSVMDGGVGVGVXLPPRPAAALYMDRAPFMVDGMYRLGS

SEQ ID NO: 23416 - protein, 263 aa, Zea mays
  unsure (1)..(263): unsure at all Xaa locations
RALYNEIRSMKVRDVPAXPESRAXPVTTSRRAPTRPSTATSRSTSTRARRTLSTTSASEVVGMDPELDEFMETYCRLLERYKEELSRPFDEAASFLSSVRTQLSSLCGGAXXSLSDEMVESSEDEPCSGDTDATTDPGQEHSSRLADRELKEMLLKKYSGCLSRLRSEFLKKRKKGKLPKDARSALMDWWNTHYRWPYPTEEDKVRLAAATGLDPKQINNWFINQRKRHWKPSEDMRFALMEGVTGGASSGTTLYFDTGTIGP

SEQ ID NO: 23417 - protein, 385 aa, Arabidopsis thaliana
MFIEKLKKKGTNASLRNRDEETADKQIQFNDQSFGGNDYAPKVRKPYTITKERERWTDEEHKKFVEALKLYGRAWRRIEEHVGSKTAVQIRSHAQKFFSKVAREATGGDGSSVEPIVIPPPRPKRKPAHPYPRKFGNEADQTSRSVSPSERDTQSPTSVLSTVGSEALCSLDSSSPNRSLSPVSSASPPAALTTTANAPEELETLKLELFPSERLLNRESSIKEPTKQSLKLFGKTVLVSDSGMSSSLTTSTYCKSPIQPLPRKLSSSKTLPIIRNSQEELLSCWIQVPLKQEDVENRCLDSGKAVQNEGSSTGSNTGSVDDTGHTEKTTEPETMLCQWEFKPSERSAFSELRRTNSESNSRGFGPYKKRKMVTEEEEHEIHLHL

SEQ ID NO: 23418 - protein, 287 aa, Arabidopsis thaliana
MAMQERCESLCSDELISSSDAFYLKTRKPYTITKQREKWTEAEHEKFVEALKLYGRAWRRIEEHVGTKTAVQIRSHAQKFFTKVARDFGVSSESIEIPPPRPKRKPMHPYPRKLVIPDAKEMVYAELTGSKLIQDEDNRSPTSVLSAHGSDGLGSIGSNSPNSSSAELSSHTEESLSLEAETKQSLKLFGKTFVVGDYNSSMSCDDSEDGKKKLYSETQSLQCSSSTSENAETEVVVSEFKRSERSAFSQLKSSVTEMNNMRGFMPYKKRVKVEENIDNVKLSYPLW

SEQ ID NO: 23419 - protein, 723 aa, Phaseolus vulgaris
MDAYSSGEEVVVKTRKPYTITKQRERWTEEEHNRFLEALKLHGRAWQRIEEHIGTKTAVQIRSHAQKFFTKLEKEALVKGVPIGQALDIDIPPPRPKRKPSNPYPRKTTIGTATLHSGAKDGNLVESSHNNQALDLEKEPLPEKYDLDEGLTTVKENKDENCSKVFKVIQEVPCSSISSANRSSISMSVPLGNSCVLKEITSSVKEVITRDENTESFLTVELGNRNLEINDGKQANGTSKNSTLENSDALQTKLVQNEKTDGLDSALTIDGMQGNQNYPRHVTVHVVDGKLGTSTQNPSQDMLFRDSMFQPIGGDNGQPNLFTNSAPTNTSESQNNTARSSVHQSFLPYPPFTQHNQDDYQSFLHMSSTFSNLVVSTLLQNPAAHVAASFAATFWPYANPETSADSPRCSQGGFTSRQIGSPPSVAAIAAATVAAATAWWAAHGLLPLCLPLHAAFACPPASVTAVPSMNPPVQDQKHPEYSEAPQAQHSDSKSLAVISSDSETGNAKLNTSPKATDHVTNETISEHLDSDKTKGRKQVDRSSCGSNTASSSDVETDALGKDEKGKEEPETPDANNLAIEFSNRRRSIYNLTDSWKEVSSEGRLAFQALFSREVLPQSFSPPHALKNKDQMDITNDYKQNIADRNEDLDSKKCSSNALHKIPSFVENNVGLLTIGLGQGKLKTRRTGFKPYKRCSVEARENRVGANCEEKGCKRIRLEGDTST

SEQ ID NO: 23420 - protein, 255 aa, Oryza sativa (japonica cultivar-group)
MCASARFDLGTGVVLMDRNTNNNSNSSSSSEMPGKKARKPYTITKPRERWSEEEHERFLDALIMYGRDWKKIEEHVGTKTTIQIRSHAQKYFLKVQKMGLAAGLPPQYPRRRLVMQQQQQQSSPAVSSSVAATAILHGQPQCLPPHHNVAVQSSIGESSFMGAASFSNTSMDWTGTTSEMATASIVQDETIELPLSPDDLQFAQVYRFIGDIFDPDSPCPVETHLQKLKSMDDIIVKTRRLLSTYDPNRGLSGHL

SEQ ID NO: 23421 - protein, 282 aa, Oryza sativa
  unsure (1)..(282): unsure at all Xaa locations
LRNARFFASSFPSPPHLPPSRRPHQQHRGENSQRLRGLGGADFLALVWRSCGVWFGLGGVRFFQNGDGLFAGKRHGNRRKRCRRSRRRREHRGSSQELNYGDMDLSGEEHVPKARKPYTITKQREKWTDEEHRLFLEALQLHGRAWRRIQEHIGTKTAVQIRSHAQKFFSEVVRESSGSNTGXGRRVRPIQIPPPRPKRKPAHPYPRKVDGAAKKHVPALSLSEQEEGSPTSVLTAVGTEALGGGFSNNSSGSGSLAPSAAAEAAGGEEAVADGELTRLCLX

SEQ ID NO: 23422 - protein, 369 aa, Triticum aestivum
  unsure (1)..(369): unsure at all Xaa locations
REKQQQRLGAADFASVLRRPPLSPIWLRRCSDFEGSRERYGSFSGNQAGSAEFRQRYADDVPKARKPYMITKQREKWTEEEHKLFLEAMQLHGRAWRRIQEHIGTKTAVQIRSHAQKFFSKVTRDSSGDSGGSSSAIQIPPPRPKRKSVHPYPKHAHAALLRVDKPQLSMCEQGNGSPTSVVTDTSTIDVEERCPTPSTGTAEVAVQAPPTNDAKKSKGSSXHFRRSWFVTTRPIPVLKLFGKTVVVNESRIXXASPGTCDLQTAADVELDTSSETLTSAPEANTWSPWLANSQQFMYYVPQGANHALERSATTTKWCMLXGLRERVSPAFVQQRGFMPYKRCAAETKAMQPQAXXREEADREMTRLCL

SEQ ID NO: 23423 - protein, 398 aa, Zea mays
  unsure (1)..(398): unsure at all Xaa locations
MESMAQERDALDSPALSIDKRLRSDAVESPLVDDATQPKEGADGYPVKVRKPYTITKQREKWTEEEHGKFLEALKLYGRSWRQIQEHIGTKTAVQIRSHAQKFFSKVVREPGASNSIEIPPPRPKRKPLHPYPRKCADSTNAPVSSPSGSDQENGSPVSVLSAMQSDAFGSSISNPSTGGTSPASSDDGNNVPEIVNGEENLLTQQIEAHQESKQDNSDGELSEEDSSRVQETSLKLFGKTVIIPDPKKVCSSDGGAGDXYTRSDANILGWRRGGSXTLPITDGFFRSILSLLIFRPAIQEGLAQGCLTKXAIESDADNSPSVETNSDRTGNVHVQTTTPTIHNNAELKPSANSAFVRVKPSSSESLVRGFVPYKRCKVEXNPTQRHTCLLLILLEID

SEQ ID NO: 23424 - protein, 376 aa, Zea mays
  unsure (1)..(376): unsure at all Xaa locations
WLVFSRGPIKGLLWTWTTSAMETSQSTLSSGDMDLPGGARAPKARKPYTISKQREKWTEDEHRLFLEALRQHGRAWRRIQEHVGSKTAVQIRSHAQKFFSKVIRESSGGDSNGTPQIQIPPPRPKRRPTHPYPRKLGNSVGKDASAAIKQLRKPQLQAQSLSEQENCSPKSVLTTAQMCSEAPVDHRLPPFTWRTNASHQTRQSGSQVCKWHSPRIPNAACEIPEAEGPVLRLFGKRVVVSNLDQQPSSNTGSLQHAADMELDDASAETPTSGTGKLSSHAAEEAETWCPXXLVALDAQTVTSNKQRSRPWTESIETSSSVPGTAQNSDPAESTKVNRGEDKVAXTRSRFKEMRGRNSXACRRGFVPYKKCTARSK

SEQ ID NO: 23425 - protein, 472 aa, Streptomyces coelicolor A3(2)
MASTSQAPSPGAGTAHPDHLGHVIFIAAAAAMGGFLFGYDSSVINGAVEAIRDRYDVGSAVLAQVIAVALIGCAIGAATAGRIADRIGRIRCMQIAAVLFTVSAVGSALPFALWDLAMWRIIGGFAIGMASVIGPAYIAEVSPPAYRGRLGSFQQAAIVIGIAVSQLVNWGLLNAAGGDQRGELMGLEAWQVMLGVMVIPAVLYGLLSFAIPESPRFLISVGKRERAKKILEEVEGKDVDFDARVTEIEHAMHREEKSSFKDLLGGSFFFKPIVWIGIGLSVFQQFVGINVAFYYSSTLWQSVGVDPADSFFYSFTTSIINIVGTVIAMIFVDRVGRKPLALIGSVGMVIGLALEAWAFSFDLVDGKLPATQGWVALIAAHVFVLFFALSWGVVVWVFLGEMFPNRIRAAALGVAASAQWIANWAITASFPSLADWNLSGTYVIYTIFAALSIPFVLKFVKETKGKALEEMG

SEQ ID NO: 23426 - protein, 81 aa, Viscum album subsp. album
GFAWSWGPLGWLVPSEIFPLEIRSAAQSINVSVNMLFTFIVAQIFLTMLCHLKFGLFLFFAFFVVLMSIFVYYFLPETKGI

SEQ ID NO: 23427 - protein, 81 aa, Viscum album subsp. album
GFAWSWGPLGWLVPSEIFPLEIRSAAQSVNVSVNMFFTFLIAEVFLTLLCHMKFGLFLFFGVFVLIMSAFVFFFLPETKGI

SEQ ID NO: 23428 - protein, 83 aa, Viscum album subsp. album
LGFAWSWGPLGWTVPSEIFPLEIRSVGQSVTVAVNLLFTFAVAQSFLSLLCVLKWGIFLFFAAWIAAMTVFVYVFLPETKGIP

SEQ ID NO: 23429 - protein, 82 aa, Viscum album subsp. album
GFAWSWGPLGWLIPSEIFPLETRSAGFFFAVSMNMFCTFLVAQAFLTMLCLMRSGIFFFFAAWIVVMGIFAIFFLPETKGIP

SEQ ID NO: 23430 - protein, 82 aa, Viscum album subsp. album
GFAWSWGPLGWLIPSETFPLETRTAGFSFAVSSNMLFTFVIAQAFLSMLCSLRAGIFFFFAAWIVVMGLFALFLLPETKGIP

SEQ ID NO: 23431 - protein, 74 aa, Viscum album subsp. album
LGWLVPSEIFPLEIRSAAQSVTVSVNMLFTFIIAQVFLTMLCHLKFGIFLFFAFFVVLMSIFIYYFLPETKGIP

SEQ ID NO: 23432 - protein, 459 aa, Sulfolobus tokodaii
MVKRLDNAEVIRLHILATIIGALGGFLFGYDTGIIGSVLVYVTPLFHLTPPEVAILTSGTSLLAGIGALAAGPITDKYGRKSLLVTDGIMYAVFALLSAIAINSFLLILWRSLVGFAIGADTAIATAYISEFSPKRWRGRLAITQQLMIFSGITASFWAGYLLSFSANWRLMLGLGVIPAVILVALRAFLPESPRWLLLNGMEEKAKNILRKFGVNIAENEHIAAPSKELSFKEMFNNKAIRTAIILVGLWLAFQQITGINVILYYGPTIYKYLGLTGPRAILNTAISESLGAIEYAISFYLIDKWGRRKLGIFGYAGLVGSLAIMLIGLRAFTSGIVFAGVALVFTAMTLFLLFFHVGVGGVGWVLQGETIPTEVRGRGAGLLAAIDWFANFVIIFIFPYWKAAFGVYSFFALELVLSILAIAIVYLFMPETKGVSLEDMLKVFERGLSVQRQKQYAK

SEQ ID NO: 23433 - protein, 476 aa, Sulfolobus tokodaii
MSSYEDLLKVLDSRKVTRLYWIITILAAIGGFLFGYDTAVIGTAAEFAPYHYSGFLLGYEIASASLGAAIGAIIAYFYTDRYGRKSLLILDAGIYTAAAVLSALTINGIMLLVMRTIIGIAIGADSAVATAYITEYAPKDKRGSLAIMQQWMITIGILGSYLVGSAILYFLPSLAYVFDWRLILGLAAVPALIGLIFRFMMPESPRWLIYTGQFDKLKRELAKFGISVSDDVLERTRTEIQSEMSIKLDTAAKKALLLVGLWLVFQQITGINVPFYYGPILLSKLHIFSSTTNPVYSAIDGVLESTILAVINVAATYIAFRYIDKIGRRTLGISAYIGMAIFDLIGGISTLFGFDIGLLISFAGFIIFFAYGVGGTGWLIQAEYFDTRIRGRMAAIGALIDWLANFALIEVFPVMLSTVGLGGSMFIFFILDLVALVFVYFFIPETKGMSLEDVVKMFSSVPISKIKNGREIVLSK

SEQ ID NO: 23434 - protein, 468 aa, Synechocystis sp. PCC 6803
MNPSSSPSQSTANVKFVLLISGVAALGGFLFGFDTAVINGAVAALQKHFQTDSLLTGLSVSLALLGSALGAFGAGPIADRHGRIKTMILAAVLFTLSSIGSGLPFTIWDFIFWRVLGGIGVGAASVIAPAYIAEVSPAHLRGRLGSLQQLAIVSGIFIALLSNWFIALMAGGSAQNPWLFGAAAWRWMFWTELIPALLYGVCAFLIPESPRYLVAQGQGEKAAAILWKVEGGDVPSRIEEIQATVSLDHKPRFSDLLSRRGGLLPIVWIGMGLSALQQFVGINVIFYYSSVLWRSVGFTEEKSLLITVITGFINILTTIVAIAFVDKFGRKPLLLMGSIGMTITLGILSVVFGGATVVNGQPTLTGAAGIIALVTANLYVFSFGFSWGPIVWVLLGEMFNNKIRAAALSVAAGVQWIANFIISTTFPPLLDTVGLGPAYGLYATSAAISIFFIWFFVKETKGKTLEQM

SEQ ID NO: 23435 - protein, 468 aa, Synechocystis sp. PCC 6803
MNPSSSPSQSTANVKFVLLISGVAALGGFLFGFDTAVINGAVAALQKHFQTDSLLTGLSVSLALLGSALGAFGAGPIADRHGRIKTMILAAVLFTLSSIGSGLPFTIWDFIFWRVLGGIGVGAASVIAPAYIAEVSPAHLRGRLGSLQQLAIVSGIFIALLSNWFIALMAGGSAQNPWLFGAAAWRWMFWTELIPALLYGVCAFLIPESPRYLVAQGQGEKAAAILWKVEGGDVPSRIEEIQATVSLDHKPRFSDLLSRRGGLLPIVWIGMGLSALQQFVGINVIFYYSSVLWRSVGFTEEKSLLITVITGFINILTTLVAIAFVDKFGRKPLLLMGSIGMTITLGILSVVFGGATVVNGQPTLTGAAGIIALVTANLYVFSFGFSWGPIVWVLLGEMFNNKIRAAALSVAAGVQWIANFIISTTFPPLLDTVGLGPAYGLYATSAAISIFFIWFFVKETKGKTLEQM

SEQ ID NO: 23436 - protein, 433 aa, Lactococcus lactis subsp. lactis
MRKLSPTFIYFFGALGGLLFGYDTGVISGALLFIEKESWQVSSWAWMEGWITAAVLMGAVIGAVVIGPMSDRFGRKRLLLLSAVIFFVGALGSGLSNSAELLIISRVILGMAVGSASALVPTYLSELSPAKIRGGVSTMFQLMIMTGILLAYISNYALKGVSGNWHWMLGLATVPAALLFIGGLFLPESPRFLVRHDNEAGAREILGMINDDPNSIEAEISDIQLMAKEEKQGGLQELFGQMSRPVLIMAIGLAIFQQVMGCNTVLYFAPSIFVAVGFGASAALLAHIGIGIFNVIVTYIAMRVMDKVNRRWMLNFGAWGMGISLVLMSVGMILAENAHIGFGKYLAVIALTVYIAFFSATWGPVMWVMIGESFPLKIRGLGNSFGAAVNWAANWVVSLTFLPLLSFFGTGKIFLIYAACCFLSIWFTSKKSY

SEQ ID NO: 23437 - protein, 470 aa, Lactobacillus casei
MYQSKTHNHRFTGHLASAKTRLRLVALISTMGGLLFGYDTGVINGALPFISSELKLAPGSQGWVTSSLTLGAAFGAILVGRLSDRYGRRRLITMLAGLFFLATVASSLSPSAGWLIGARLILGLAVGGVSVLVPSFLAEIAPTSHRGRLVTQNELMVVTGQLLAFVLNAFLGTTFGNVPGIWRWMIVLAVIPAIILGIGTYFVPESPRWLMMKGRPAAARSSLEVLRSAAEVPAEIDHLKQNLAEDAKHKQASVRALKTKWIRRLVLIGIGLGVIQQIAGINVMMYYGTSILQMTGFGRDSALIANIANGVTAVAATIVTLQLLKHVPRRPMLIVGLIGSTVAITGVTFASRLPAGSPFRAFATIGMMMLFLAFFQGAISPMTWLLMSEIFPEQVRGIGMGAATFCLWLANFGVGVLFPIGLAQIGMFWTFVCFIGTNLISLLFVLIFVPETAGRSLETLHREEKARLNH

SEQ ID NO: 23438 - protein, 270 aa, Beta vulgaris
  unsure (1)..(270): unsure at all Xaa locations
AMGGLIFGYDIGISGGVTSMPDFLKKFFPSVYRKEALDKSVNQYCKFDSVTLTLFTSSLYVAALVASLVASVVTRKLGRKLSMLFGGLLFCVGAIINALAKDVAMLIVGRILLGFGVGFANQSVPLYLSEMAPYKYRGSLNIGFQLSITIGILIANVLNYFFAKIHDWGWRLSLGGAMVPAIIISIGSLLLPDTPNSMIERGKRDEALLKLKRVRGVDDVEDEFNDLVVASENSKKVEHPWRNLLQRKXRPHLTMGFXIPFFHNLLGLMX

SEQ ID NO: 23439 - protein, 527 aa, Aspergillus nidulans
MADAVIAGQRVEAPVTWKAYLMCVFAAFGGIFFGYDSGYINGVMGMDYFIQEFTGKVKSETPAAQFVISSSNKSLITSILSAGTFFGAIIAGDLAEWYGRRITIINGCGVFMAGVAFQIASTTVPMLVVGRLIAGVGVGFVSAIIILYMSEISPRRFRGAIVSGYQFCITIGLMLASCVNYGTENRNDSGSYRIPIALQLLWAIILGIGLFVLPESPRYYVRKNNLAEAAKTLARVRGQPPESEYITQELAEIVANNEYEMQVIPQGGYFATWLNCFRGGLRSPNSNLRRVILGTSLQMMQQWTGVNFVFYFGTTFFQNLGTIDDPFLISMITTIVNVFSTPISFYTMEKLGRRPLLLWGALGMVVCQFIVAIAGTVDGDNSKTVSAQISFICIYIFFFASTWGPGAWVVIGEIFPLPIRSRGVALSTASNWLWNCIIAVITPYMVDIDKGNLKSRVFFIWGSLCACAFVYVYFLIPETKGLTLEQVDKMMEETTPRTSAKWKPHSTFATEMGMTEKNASTTVESAA

SEQ ID NO: 23440 - protein, 533 aa, Aspergillus nidulans
MSILALVEDRPTPREVYNWRVYLLAAVASFTSCMIGYDSAFIGTTLSLQSFQNEFNWESLNTDLISANIVSLYQRGAFFGALFAYPIGHFWGRRWGLMFSALIFFLGAGMMLGANGDRGLGLIYGGRVLAGIGVGAGSNICPIYISEMAPSAIRGRLVGVYELGWQIGGVVGFWINYGVDETLAPSHKQWIIPFAVQLIPAGLLIIGALLIRESPRWLFLRGNREKGIETLAWIRNLPADHIYMVEEINMIEQSLEQQRVKIGLGFWKPFKAAWTNKRILYRLFLGSMLFLWQNGSGINAINYYSPRVFKSIGVSGGNTSLLTTGIFGVVTAVITFVWLLYLIDHFGRRNLLLVGAAGGSVCLWIVGGYIKIAKPENNPEGTQLDSGGIAAIFFFYLWTAFYTPSWNGTPWVINSEMFDPTVRSLAQACAAASNWLWNFLISRFTPQMFTSMGYGVYFFFASLMILSIVFVFFLIPETKGVPLESMETLFDKKPVWHAHSQLIRELRENEEAFRADMGASGKGGVTKEYVEEA

SEQ ID NO: 23441 - protein, 512 aa, Giardia lamblia ATCC 50803
MGMKDSYASSYPNTCVFFIFVLFTGLTMASTFTNMGAPIQDLYSIDIGNAYGYKGGNSPDPLSTSVTAAFSAAFFVGAFVGSLLTFPIVEKLGRKLSTIVFCVSTIVLTALMTVKTHWAYLIVIRVLAGFPASCIQTVTPLWISETCPPHRRGIATVGIQLFLTLGILLSYIMEWGLISVCRGTIKNNGSNGPYGINSSCSSSHNLWYLAFVLTIVYLVGLLIFCFFIPERVVTSTQASEQVKASTQSPDATSTELHAASVEVKTISLEQAQKPSKDDTDSASFKDCFARKDYRRCLAISIILPFLQQFTGINAVILFAGSFFTAVKMPDSSLVGAIIIGSWNFVSTIVAIPIVERMGRRFLLFLGTFILTAMLIMLIPVYVVNTDSNKENPAILACIMIGVLLYIFGFAIAPGPLVFTICGEIFPKAARVKFNSIAFAMHKLASIIVVFTFPYMQDKLWQAFVLYLVITIFFTILSWFIIPETKGKTLDEIEEVVVNEKVFEKFDMCGRVR

SEQ ID NO: 23442 - protein, 508 aa, Giardia lamblia ATCC 50803
MSHQTRNRTQIVLLVFLILAGGFNIGSVLANVPLTVLRAYAQITGGFDPDGTDARNRTIFSFLTSSIVIGSFASIFITAPIVNRIGRKAACMLFAVLVAGLLGLTLIPVNYLYLIIMRFLVGVPSTSFLIVFPAWISELSPSEIRGRLTSCLQLGNSLGTFFVYLLVIIVKHWPSTWQVPTGFTILSCIVVFVLAIPIKELPLSALPDHEQQHPHPHPHPQQSSFIEMSQTTVPASSSCTDISGVSRATILTVVENGARSATNPSSQSSDSPVPLKEIFCNRIYRRCVFISVCMPLMQQGVGVNAILLYAGSIFKQLSFPDSDVVGAALLALWCVLAGIIAIPLVEQKGRRYLIFIGMPIILFSLILLMTSYLITNQTVTTVLLLVSIFLYFLAFNFSIGPLIFTVCGESFPQRIRIRLMSFTFLIFRIISIVVMISFPYTLDILYITFFLYFCVGLVSTVLCWFSLPELKQKTPEEVEKAVLTEYVFELFTLTGKTVRRKSDVQSVN

SEQ ID NO: 23443 - protein, 211 aa, Magnetospirillum magnetotacticum
  unsure (1)..(211): unsure at all Xaa locations
MNAPTGRLGHGALTPLVVASTVGAALGGFMFGFDTAVVNGAVDALKAELGVGSALVGVIVASALLGAAVGAFAAGTIADRFGRRRLMMVAGTLFVTTSVLCAVAHDGPTLALWRFLGGVGVGMASVVAPLYIAEIAPARLRGRLATAQQMSIVLGIFAALVSNAFLVRAAGGAEAELXLGLSDWRWMFLVAVVPSLAYVVPGGLVAEFPGT

SEQ ID NO: 23444 - protein, 519 aa, Caulobacter crescentus CB15
MVVRTTACALIPVTLMSPATKGPTRTSRASTGRYGPMGRTPVASVSNAGPSAGMSADGGKVNMTFVAAIVAVATIGGFMFGYDSGVINGTQEGLESAFNLSKLGTGLNVGAILIGCAIGAFAAGRLADVWGRRTVMIISALLFVISAIGTGAAESSIVFIIFRLIGGLGVGAASVLCPVYISEVTPANIRGRLSSVQQIMIITGLTGAFVANYALAHTAGSSTAEFWLGLPAWRWMFWMQIIPAGVFFLCLLGIPESPRYLVAKGKDAQAEAILSRLFGAGQGAKKVEEIRASLSADHKPTFSDLLDPTTKKLRVILWAGLVLAVFQQLVGINIVFYYGSVLWQSVGFTEDDSLKINILSGTLSILACLLAIGLIDKIGRKPLLLIGSAGMAVTLGVLTWCFSTATTVNGALTLGDQIGLTALIAANLYVIFFNLSWGPVMWVMLGEMFPNQMRGSALAVCGFAQWIANFAISVSFPALAAASLPMTYGFYALSAVVSFFLVQKLVHETRGKELEAMQG

SEQ ID NO: 23445 - protein, 491 aa, Corynebacterium glutamicum ATCC 13032
MASTFIQADSPEKSKKLPPLTEGPYRKRLFYVALVATFGGLLFGYDTGVINGALNPMTRELGLTAFTEGVVTSSLLFGAAAGAMFFGRISDNWGRRKTIISLAVAFFVGTMICVFAPSFAVMVVGRVLLGLAVGGASTVVPVYLAELAPFEIRGSLAGRNELMIVVGQLAAFVINAIIGNVFGHHDGVWRYMLAIAAIPAIALFFGMLRVPESPRWLVERGRIDEARAVLETIRPLERAHAEVADVEHLAREEHAVSEKSMGLREILSSKWLVRILLVGIGLGVAQQLTGINSIMYYGQVVLIEAGFSENAALIANVAPGVIAVVGAFIALWMMDRINRRTTLITGYSLTTISHVLIGIASVAFPVGDPLRPYVILTLVVVFVGSMQTFLNVATWVMLSELFPLAMRGFAIGISVFFLWIANAFLGLFFPTIMEAVGLTGTFFMFAGIGVVALIFIYTQVPETRGRTLEEIDEDVTSGVIFNKDIRKGKVH

SEQ ID NO: 23446 - protein, 463 aa, Leuconostoc mesenteroides subsp. mesenteroides ATCC 8293
LFGYDTGVISGAMLFIGKELEIQTGSFEDGFITASVLLGAILGAAIIGPMSDKLGRKKLLLSAAIIFFVGALGSGIGFNYTLLVTSRVLLGIAVGAASALIPTYLAELSPADKRGGIGTLFQLMIMTGIFLAYVSNEWLSPSGWLGLNQNVGWHWMLGLAAVPAALLFIGGLSLPESPRFLVKQGKMSEAQKVLSTMNPNAKLVEEELYDIKLQANTPSGGFKELFGPMARPVLIMALGLAIFQQVMGCNTVLYYAPKIFISAGFSEHFALQSHIVIGLFNVIVTAIAVKIMDKIDRKKMLTYGAIGMGASLLTMSTAMLVLRAGNGNVGSWICVIALTLYIAFFSATWGPVMWVMIGEAFPLNIRGLGNSFGAVINWTANFAVSQSFPMLLIAFTPDHAINAEGQGIAKLFIIYGVLCFVAIWFIAKFTIETRNRSLESIESDLRSKAHAKGYLESDYVGIK

SEQ ID NO: 23447 - protein, 457 aa, Leuconostoc mesenteroides subsp. mesenteroides ATCC 8293
MKTKSKKVKLNFLHYCVYVISLGGFLFGYDTGVINGALAFMSRPDQLNLTPTLQGVVSSSLVIGACFGALGCGRVADKIGRRKTLRIIAIVFTIATVLCAVAMNFWLMSLFRFVLGLAVGAASSLSPMYLAEISPENLRSANVNKNAIFIVLGQLCAFIVNAILGNIWGHWGPIWRVMVISGAVPSIILWVNSFRISGSPQWLLLKHRFNRARKIFRRLGFKNTNQLIKSQSDQSSEQNDNEFNWSIALKNKKLFYLLVTGIVIALIQQISGVNTVMYYGTILLEKVGMGESGSLYANVLIGVVSVIASIFGTRMIEHANHHRMLIIGLIGNVVFMALLGTIMKSSVFSQGITNALVLVSLTLFLANHQGIVSPVTWLLLAEMFPGKVKAQFMSVATATTWITNFVISLIYPQLVAILGTALVFFVFAMSNGLSIVLASLFVNSKKMAKAYDTASLS

SEQ ID NO: 23448 - protein, 470 aa, Microbulbifer degradans 2-40
MTDSALPSGENKSFVILISCIATIGGFLFGFDSGVINGTVDGLVTSFGVTKTAVGVHVAFMLLGCAVGAAAAGRLADLYGRRAMLIVAAILFIVSAWGSGVATGIVEFDIYRLLGGLAVGAASVMAPAYISEVAPARYRGRLTTIQQVAIISGLTAAFLSNYVLAHTAGSSLEPFWMGIATWRWMFWIEIAPAAIFFFALMVIPESPRFLVASGKKDKALTVLTKLYGAQAAPGKVAEIDSSLDHDHKPRLSDLISKVTGKVRPIVWVGIGLATFQQLVGINVIFYYGSILWQSVGFSEDHALLINVVSGAVSIGAVVLSLVLVDKIGRKPLLWIGSAGMAVTLTLTAIAFATGTLDANGDLQLSDNMGILALVAANVYVIFFNMSWGPVMWVMLGEMFPNQIRGSGLAVAGLFQWGSNWAITMSFPALLAGLGLAVTYGFYALCAFISIIFVIKYVNETNGVELEDMEG

SEQ ID NO: 23449 - protein, 366 aa, Oenococcus oeni MCW
MSAVGFVSMVIARIILGFAVGSASALTPAYLAELADAPHRGSLGSMFQLMITLGILLAYVSNLGFLGHNLLGLRDWRWMLGSALIPALILFIGSIVLPESPRYLVEKGRIDEARSVLHYLREKTNEDPDKELADIKKVSNQPKGGFKELFTFARPAVIVAIGLMLLQQLVGINSVIYFLPQVFIKGFGFQAGNAIWISVGIGVVNFLCTVLAYNIMDKFNRRTILLFGSIVMSVSIGILSVLNFTLSIKQAAIPTMILIAIYIFGFAVSWGPICWLMIGEIFPLNIRGVGTSIGSAANWIANFIVSQFFLVLLATFHYNVGGPFAIFTFFAILSIFFVIYLVPETRGKSLEQIEMDMRRKPLPKKN

SEQ ID NO: 23450 - protein, 535 aa, Bifidobacterium longum DJO10A
MRQRGHAAGAARQRRKDKAMTTTASPVSKQTASAAQETGATGAAATAIETIETGVAGVADAATNAAANAIEDLEAAESRGFSTRFPLNSAFIFTFGALGGMLFGFDTGIISGASPLIESDFGLSVSQTGFITSSVLIGSCAGALSIGALSDRFGRKKLLIVSALLFLLGSGLCASSTGFAMMVCARIILGLAVGAASALTPAYLAELAPKERRGSLSTLFQLMVTFGILLAYASNLGFLNHNLFGIRDWRWMLGSALVPAALLLLGGLLLPESPRYLVNKGDTRNAFKVLTLIRKDVDQTQVQIELDEIKAVAAQDTKGGVRELFRIARPALVAAIGIMLFQQLVGINSVIYFLPQVFIKGFGFPEGDAIWVSVGIGVVNFVSTIVATLIMDRFPRKGMLIFGSIVMTVSLAVLAVMNFVGDVAVLAVPTMILIAFYILGFAVSWGPIAWVLIGEIFPLSVRGIGSSFGSAANWLGNFIVSQFFLVLLDAFGNNVGGPFAIFGVFSALSIPFVLRLVPETKGKSLEEIEKEMTKR

SEQ ID NO: 23451 - protein, 473 aa, Pseudomonas syringae pv. syringae B728a
MSSSSTSAAAGQQGRQRAASNRLIFISVLVATMGALAFGYDTGIIAGALPFMTLPADQGGLGLDAYSEGMVTASLIVGAAFGSLASGYISDRFGRRLTLRLLSVLFIAGALGTAIAPSIPFMIAARFVLGIAVGGGSATVPVFIAEIAGPSRRARLVSRNELMIVSGQLLAYVLSAVMAALLHTPGIWRYMLAVAMVPGVLLLVGTFFVPASPRWLASKGRFDEAQDVLEQLRPSKQDAQREVDEMKAQDEEARHRPKARELLRQRWVIKLLLIGVGLGFTAQFTGVNAFMYYTPIILKNTGMGTNAALTATIGNGVVSVIATLLGIWAIGRYGRRHLLMTGLVIVILMQAALGCVLQFMPQNMTQSYTALACILVFLLFMQMCISPVYWLLMSELFPMQVRGLLTGTAVSMQWLFNASVAFTFPIAVDTIGNPTFFIFAAINIGSLIFVFLCLPETKGKSLEQIEKHLKKEL

SEQ ID NO: 23452 - protein, 517 aa, Bifidobacterium longum NCC2705
MTTTTASPVSKQTASAAQETSATGAAATAIETIETGVAGVAGAATNAAANAIEDLEAAESHGFSTRFPLNSAFIFTFGALGGMLFGFDTGIISGASPLIESDFGLSVSQTGFITSSVLIGSCAGALSIGALSDRFGRKKLLIVSALLFLLGSGLCASSTGFAMMVCARIILGLAVGAASALTPAYLAELAPKERRGSLSTLFQLMVTFGILLAYASNLGFLNHNLFGIRDWRWMLGSALVPAALLLLGGLLLPESPRYLVNKGDTRNAFKVLTLIRKDVDQTQVQIELDEIKAVAAQDTKGGVRELFRIARPALVAAIGIMLFQQLVGINSVIYFLPQVFIKGFGFPEGDAIWVSVGIGVVNFVSTIVATLIMDRFPRKGMLIFGSIVMTVSLAVLAVMNFVGDVAVLAVPTMILIAFYILGFAVSWGPIAWVLIGEIFPLSVRGIGSSFGSAANWLGNFIVSQFFLVLLDAFGNNVGGPFAIFGVFSALSIPFVLRLVPETKGKSLEEIEKEMTKR

SEQ ID NO: 23453 - protein, 473 aa, Pseudomonas syringae pv. tomato str. DC3000
MSSSSTTAAADTQGRQNASPNRLIFISVLVATMGALAFGYDTGIIAGALPFMTLPADQGGLGLNAYSEGMITASLIVGAAFGSLASGYISDRFGRRLTLRLLSVLFIAGALGTAIAPSIPFMVAARFLLGIAVGGGSATVPVFIAEIAGPSRRARLVSRNELMIVSGQLLAYVLSAVMAALLHTPGIWRYMLAIAMVPGVLLLIGTFFVPPSPRWLASKGRFDEAQDVLEQLRSNKDDAQREVDEMKAQDEQARNRPKAKELLRQRWVIKLLLIGIGLGFTAQLTGVNAFMYYTPIILKNTGMGTNAALTATIGNGVVSVIATLLGIWAIGRYGRRHLLMTGLVMVILMQAALGCVLQFMPQNLTQSYTALACILVFLLFMQMCISPVYWLLMSELFPMQVRGLLTGTAVSMQWLFNASVAFTFPIAVDTIGNPTFFIFAAINVGSLIFVFLCLPETKGKSLEQIEKHLKKEL

SEQ ID NO: 23454 - protein, 468 aa, Bacteroides thetaiotaomicron VPI-5482
MKSTINFGYLIFLSVVAALGGFLFGYDTAVISGTIAQVTQLFQLDTLQQGWYVGCALIGSIVGVLFAGILSDKLGRKMTMIISATLFSTSALGCAISADFTQLVVYRIIGGVGIGVVSIVSPLYISEVAVAQYRGRLVSLYQLAVTVGFLGAYLINYQLLAYAESGNQLSMDWLNKIFVTEVWRGMLGMETLPAVLFFIIIFFIPESPRWLIVRGKEEKAVNILERIYNSVSEAASQLKETKSVLTSETKSEWAMLMKPGIFKAVIIGVCIAILGQFMGVNAVLYYGPSIFENAGLSGGDSLFYQVLVGLVNTLTTVLALVIIDRVGRKQLVYYGVSGMVVSLLLIGVYFLFGDSWGVSSLFLLVFFLFYVFCCAVSICAVVFVLLSEMYPTKVRGLAMSIAGFALWIGTYLIGQLTPWMLQNLTPAGTFFLFAVMCVPYMLIVWKLVPETTGKSLEEIERYWTRSEQ

SEQ ID NO: 23455 - protein, 468 aa, Bacteroides thetaiotaomicron VPI-5482
MKTTINLGYIIFLSVVAALGGFLFGYDTAVISGTIAQVTHLFQLDTLQQGWYVGCALIGSIVGVLFSGILSDSIGRKRTMILSAILFSTSAIGCAFCIDFNQLVVYRIIGGIGIGVVSIVSPLYISEVSVAQFRGRMVSLYQLAVTVGFLGAYLVNYQLLAYSESGNHLPIAWLEKIVVTEVWRGMLGMETLPAIIFFIIIFFIPESPRWLIVKGQERKATYILEKIYNSFKEADFQLNETKSVLVSETRSEWSILLKPGILKAVIIGVCIAILGQFMGVNAVLYYGPSIFENAGLSGGDSLFYQVLVGLVNTLTTILALLIIDKVGRKKLIYYGVSGMVVSLILIGSYFLFGNAWNISSLFLLAFFLCYVFCCAISICAVIFVLLSEMYPTKIRGLAMSIAGFALWIGTYLIGQLTPWMLQNLTPAGTFFLFAIMCVPYMLIVWKLVPETTGKSLEEIERYWTRSER

SEQ ID NO: 23456 - protein, 470 aa, Streptomyces avermitilis MA-4680
MTSTAQAPGAREAHPEHLGHVIFIAAAAAMGGFLFGYDSAVINGAVEAIRSKYDIGSATLAQVIAIALIGCAVGAATAGRIADRIGRIRCMQIAAVLFTASAIGSALPFALWDLAFWRVIGGFAIGMASVIGPAYIAEVAPAAYRGRLGSFQQAAIVIGIAISQLVNWAILNAAGGDQRGKLLGLEAWQVMLGVMVVPAVLYGLLSFAIPESPRYLIEAGKDARAREVLEEVEGKEIDLDARVEEIRLAMYREEKPSFKDLLGGTFFFKPIVWVGIGLSVFQQFVGINVAFYYSATLWQSVGVDPTDSFLYSFTTSIINIIGTVIAMIFVDRVGRKPLAIIGSVGMVIGLALEAWAFSYDLVDGKLPATQGWVALIAAHVFVLFFALSWGVVVWVFLGEMFPNRIRAAALGVAASAQWIANWAITASFPSLADWSLSGTYIIYTVFAALSIPFVLKFVKETKGKALEEMG

SEQ ID NO: 23457 - protein, 485 aa, Thermoplasma acidophilum
MENGVRYSDLIERLDMSRVTRFYWLLTILATIGGFLFGYDTSNIGSALPLLERIYPGISGFVEGYLVAGASLGAAVGAIIAAGLTDRYGRKYLLIADAAIYAAGALLSAFTVDLVMLLLSRTLIGIAVGADSGIATAYIAEYAPKARRGSLGILQQWMITIGILAAYLIGMATLFFAPGLAYAVGWRIMLGVAAIPAIIGLAFRFMMPESPRWLLVNGKYKEASASLKRLGLNMSEEDLKSVKLSQPHKITPGVKRALLIVGLFFVFQQITGINIPFYYGPVVLENLHIVGKSTSLVYSIYYSIAASAILAIINVAATYIGFRYIDSVGRRKLALMGYAGMTFFGILGGILLYLKLDIGLFIAFAGFIIFFAFGVGGTGWMIQGEYFPTSMRGLYASLGAFIDWIANFAIIELFPVMDSAITIKNVEFVFGVLSLIALILFYYIMPETKGLSVEQIDTLFENNSLGQMKHASISMKKESVPADPK

SEQ ID NO: 23458 - protein, 570 aa, Saccharomyces pastorianus
MSHVNASYAHSQGSSTSVSRVEMEKPATKEVFEDPTPKKFELDDDEAGKTSSVFNPDLNLEEEVRALDELGDSFKRDRSFWGKMKALEFEVEFENKKNMVLMLGTFAAFAGILSGIDQSIISGASIGMNKMLHLSTHEASLVSSLMPLGAVAGSILLTPFSEYFGRKKSLAISCVFYTIGAIVCAAASNHHEMYAGRFLIGVGVGLEGGGIGVYIAESVPSSVRGSLVSLYQFNIALGELFGYIVGVIFFDVKGGWRYMVGSSLVFSTTLFIGLLFLPESPRWLMHKGRVGESWNVWKRLRDVKEEGNKIEFLELRDVASHDRELHANESRFQSLFDLVRVPRNRRALVYSCMMIGLGQLTGINAIMYYMSTLMKNIGFDDKQSVAMSMVGGAALLIGTVPAILWMDRFGRRTWAMTIIIFIVGLVLVGVGYQINLKTHMAAAEGVYLTGQIIYNMAFGSYAALTWVLPSESFSLGTRSAGMTVSSALLYLFAFTVTYNFEKMKEAMTYTGLTLGFYGGIALAIGIPYQLLCMPETKNRTLEEIDDIFEKPTSQIIKENIAYLKKGQLSY

SEQ ID NO: 23459 - protein, 566 aa, Kluyveromyces lactis
MSELETGTAAHGTPVENKSVSSSQASTPTNVGSRDDLKVDDDNHSVDAIELPKKPRSAYITVSILCLMVAFGGFVFGWDTGTISGFVNQTDFIRRFGQEKADGSHYLSNVRTGLIVSIFNIGCAIGGIILSKLGDMYGRRIGLMIVVLIYVVGIIIQIASIDKWYQYFIGRIISGLGVGGISVLSPMLISETAPKHIRGTLVSFYQLMITFGIFLGYCTNYGTKTYSNSVQWRVPLGLCFAWAIFMITGMLFVPESPRFLVEKDRIDEAKRSIAKSNKVSYEDPAVQAEVDLICAGVEAERLAGSASIKELFSTKTKVFQRLIMGMLIQSFQQLTGNNYFFYYGTTIFNSVGMDDSFETSIVLGIVNFASTFVAIYVVDKFGRRKCLLWGAAAMTACMVVFASVGVTRLWPDGANHPETASKGAGNCMIVFACFYIFCFATSWAPIAYVVVAESYPLRVKAKCMAIATASNWIWGFLNGFFTPFITSAIHFYYGYVFMGCLVAMFFYVFFFVPETKGLTLEEVQEMWEEGVLPWKSSSWVPSSRRNAGYDVDALQHDEKPWYKAML

SEQ ID NO: 23460 - protein, 519 aa, Vitis vinifera
MPAVGGFDKGTGKAYPGNLTPYVTVTCVVAAMGGLIFGYDIGISGGVTSMAPFLQKFFPSVYRKEALDKSTNQYCKFDSETLTLFTSSLYLAALLSSLVAATVTRKFGRKLSMLFGGLLFCAGAIINGAAKAVWMLIVGRILLGFGIGFANQSVPLYLSEMAPYKYRGALNIGFQLSITIGILVANILNYFFAKIKGGWGWRLSLGGAVVPALIITVGSLVLPDTPNSMIERGQHEGAKTKLRRIRGVDDVEEEFNDLVVASEASKLVEHPWRNLLQRKYRPHLTMAILIPFFQQLTGINVIMFYAPVLFKTIGFADDASLMSAVITGGVNVLATIVSIYGVDKWGRRFLFLEGGTQMLICQVIVATCIGVKFGVDGEPGALPKWYAIVVVLFICVYVSGFAWSWGPLGWLVPSEIFPLEIRSAAQSVNVSVNMFFTFIIAQIFLNMLCHMKFGLFLFFAFFVVVMSFFIYFFLPETKGIPIEEMAEVWKSHWFWSRYVNDGSYSGVELVKENYPVKNV

SEQ ID NO: 23461 - protein, 519 aa, Vitis vinifera
MPAVGGFDKGTGKAYPGNLTPYVTVTCVVAAMGGLIFGYDIGISGGVTSMAPFLQKFFPSVYRKEALDKSTNQYCKFDSETLTLFTSSLYLAALLSSLVAATVTRKFGRKLSMLFGGLLFCAGAIINGAAKAVWMLIVGRILLGFGIGFANQSVPLYLSEMAPYKYRGALNIGFQLSITIGILVANILNYFFAKIKGGWGWRLSLGGAVVPALIITVGSLVLPDTPNSMIERGQHEGAKTKLRRIRGVDDVEEEFNDLVVASEASKLVEHPWRNLLQRKYRPHLTMAILIPFFQQLTGINVIMFYAPVLFKTIGFADDASLMSAVITGRVNVLATIVSIYGVDKWVRRFLFLEGGTQMLICQVIVATCILVKFGVDGEPWCLPKWYAIVVVLFICVYVSGFAWSWGPLGWLVPSEIFPLEIRSAAQSVNVSVNMFFTFIIAQIFLNMLCHMKFGLFLSFAFFVVVMSFFIYFFLPETKGIPIEEMAEVWKSHWFWSRYVNDGSYSGVELVKENYPVKNV

SEQ ID NO: 23462 - protein, 442 aa, Ralstonia solanacearum
MANNVSIEDVPLNGFHQLLSIRSGGGWVLDGYVLSIIGVAMVQLSAALHLSGFWQGMVAASALIGIFCGGFLGGLLTGCLGRQKLYFFGPTIFVVCSLAQFWADSGAALFFFRFLIGVGVGFEYPVAGSLLVEFMPRKDRGPRLAMLTILWFAGAALAYMVGNAILDTGRADAWRLVLASPAVIGALLLLVRIGTPESPRWLLSKGRAAEAERVIQQVYGPQFSLENLPEQRPEKKVSLLSLLHSGYGKRMLFVSVFWSCSVIPVFAVYAFAPTVLQALHLKGAWASFGSVAITLLFVVGCFVATRLINTVGRRSMLIHSFLWSGLALLGLGLFCDGSEMLVLVLFGAYAVFIGGAQVLQLVYPNELFPTEIRSAAVGMGASLSRIGAAIGTWAVPVALQGIGVGNTMFAAAGVTLFGLLVSLAIAPETRALSLQEAASLSR

SEQ ID NO: 23463 - protein, 534 aa, Chlorella kessleri
MAGGAIVASGGASRSSEYQGGLTAYVLLVALVAACGGMLLGYDNGVTGGVASMEQFERKFFPDVYEKKQQIVETSPYCTYDNPKLQLFVSSLFLAGLISCIFSAWITRNWGRKASMGIGGIFFIAAGGLVNAFAQDIAMLIVGRVLLGFGVGLGSQVVPQYLSEVAPFSHRGMLNIGYQLFVTIGILIAGLVNYGVRNWDNGWRLSLGLAAVPGLILLLGAIVLPESPNFLVEKGRTDQGRRILEKLRGTSHVEAEFADIVAAVEIARPITMRQSWRSLFTRRYMPQLLTSFVIQFFQQFTGINAIIFYVPVLFSSLGSASSAALLNTVVVGAVNVGSTMIAVLLSDKFGRRFLLIEGGITCCLAMLAAGITLGVEFGQYGTEDLPHPVSAGVLAVICIFIAGFAWSWGPMGWLIPSEIFTLETRPAGTAVAVMGNFLFSFVIGQAFVSMLCAMKFGVFLFFAGWLVIMVLCAIFLLPETKGVPIERVQALYARHWFWKKVMGPAAQEIIAEDEKRVAASQAIMKEERISQTMK

SEQ ID NO: 23464 - protein, 533 aa, Chlorella kessleri
MAGGGVVVVSGRGLSTGDYRGGLTVYVVMVAFMAACGGLLLGYDNGVTGGVVSLEAFEKFFPDVWAKKQEVHEDSPYCTYDNAKLQLFVSSLFLAGLVSCLFASWITRNWGRKVTMGIGGAFFVAGGLVNAFAQDMAMLIVGRVLLGFGVGLGSQVVPQYLSEVAPFSHRGMLNIGYQLFVTIGILIAGLVNYAVRDWENGWRLSLGLAAAPGAILFLGSLVLPESPNFLVEKGKTEKGREVLQKLRGTSEVDAEFADIVAAVEIARPITMRQSWASLFTRRYMPQLLTSFVIQFFQQFTGINAIIFYVPVLFSSLGSANSAALLNTVVVGAVNVGSTLIAVMFSDKFGRRFLLIEGGIQCCLAMLTTGVVLAIEFAKYGTDPLPKAVASGILAVICIFISGFAWSWGPMGWLIPSEIFTLETRPAGTAVAVVGNFLFSFVIGQAFVSMLCAMEYGVFLFFAGWLVIMVLCAIFLLPETKGVPIERVQALYARHWFWNRVMGPAAAEVIAEDEKRVAAASAIIKEEELSKAMK

SEQ ID NO: 23465 - protein, 540 aa, Chlorella kessleri
MAGGGPVASTTTNRASQYGYARGGLNWYIFIVALTAGSGGLLFGYDIGVTGGVTSMPEFLQKFFPSIYDRTQQPSDSKDPYCTYDDQKLQLFTSSFFLAGMFVSFFAGSVVRRWGRKPTMLIASVLFLAGAGLNAGAQDLAMLVIGRVLLGFGVGGGNNAVPLYLSECAPPKYRGGLNMMFQLAVTIGIIVAQLVNYGTQTMNNGWRLSLGLAGVPAIILLIGSLLLPETPNSLIERGHRRRGRAVLARLRRTEAVDTEFEDICAAAEESTRYTLRQSWAALFSRQYSPMLIVTSLIAMLQQLTGINAIMFYVPVLFSSFGTARHAALLNTVIIGAVNVAATFVSIFSVDKFGRRGLFLEGGIQMFIGQVVTAAVLGVELNKYGTNLPSSTAAGVLVVICVYVAAFAWSWGPLGWLVPSEIQTLETRGAGMSMAVIVNFLFSFVIGQAFLSMMCAMRWGVFLFFAGWVVIMTFFVYFCLPETKGVPVETVPTMFARHWLWGRVMGEKGRALVAADEARKAGTVAFKVESGSEDGKPASDQ

SEQ ID NO: 23466 - protein, 534 aa, Chlorella kessleri
MAGGGVVVVSGRGLSTGDYRGGLTVYVVMVAFMAACGGLLLGYDNGVTGGVVSLEAFEKKFFPDVWAKKQEVHEDSPYCTYDNAKLQLFVSSLFLAGLVSCLFASWITRNWGRKVTMGIGGAFFVAGGLVNAFAQDMAMLIVGRVLLGFGVGLGSQVVPQYLSEVAPFSHRGMLNIGYQLFVTIGILIAGLVNYAVRDWENGWRLSLGPAAAPGAILFLGSLVLPESPNFLVEKGKTEKGREVLQKLCGTSEVDAEFADIVAAVEIARPITMRQSWASLFTRRYMPQLLTSFVIQFFQQFTGINAIIFYVPVLFSSLGSANSAALLNTVVVGAVNVGSTLIAVMFSDKFGRRFLLIEGGIQCCLAMLTTGVVLAIEFAKYGTDPLPKAVASGILAVICIFISGFAWSWGPMGWLIPSEIFTLETRPAGTAVAVVGNFLFSFVIGQAFVSMLCAMEYGVFLFFAGWLVIMVLCAIFLLPETKGVPIERVQALYARHWFWNRVMGPAAAEVIAEDEKRVAAASAIIKEEELSKAMK

SEQ ID NO: 23467 - protein, 516 aa, Blumeria graminis
MHRTFHPYFLLKMSGSSQRHSHVTGYLILLVAVATLGPLQYGYHLAELNAPQDVITCHSLLGRQNVASKSLSNPSQCIPMTEAEFAALSSIYILGGLAGAITAGPISSSHGRLLTMRITGIFFILGSLIETIAESVPVMSTGRFLAGLGAGAATVVAPMYISEISPAEKRGLFGTMTQAMISVGIFVTQSLGYFFSRGMLWRIILGVGAGFGLLLGAGLCFIPESPSWLASHHNPTLAVKTLQRIRGAGTPIHKETAGWNVQEINGEEERLIRPSDLSSTSQYNQHNLATPNLKLPSVGFFGVLQDPLYRPAIMAVCGIMIAQQLSGINSIMMYSVSLLRGVLPIPSILLTIIMSAMNVITTIVCAPLADRIGRKSCLLLSIAGMGTMSLLLAISLRMEWKLFSAIAVISFVAFFATGLGPVPYIMASELVGQEAVGAAQSWALAANYLASFLVAQFFPLLNSWMNNRWGGAGWVYFIFTAFAGVSWIFVTYYVPETNGKTGPDEVWGRTTGEVAD

SEQ ID NO: 23468 - protein, 82 aa, Betula pendula
GFAWSWGPLSWLIPSEIFPMKIRSTGQSISVAVQFAATFVLSQTFLSMLCHFKFGTFLFYSGWIAIMTLFVALFLPETKGIN

SEQ ID NO: 23469 - protein, 82 aa, Betula pendula
GFAWSWGPLGWLIPSEIFPLETRSSGFFFAVSMNMFCTFLIAQAFLTMLCWMQSAIFYFFAAWIVVMCSFAIFMLPETKGIP

SEQ ID NO: 23470 - protein, 469 aa, Azotobacter vinelandii
MQTSTYTSDQTAQVAPARKDLAALIAIVAALGGLLFGYDTGIIGVALLGLSQDFVLNDTLKQFVTGAIIFGALFGCLLTGPISDRIGRRRTIIGVGLVFALGSLLSALSPSVGFLVVSRFLLGLSAGSSTQIIPVYIAEVAPPQHRGKLVVLFQLMVMTGITVAYFTGFALGEHWRWMFGLGVVPALILLAGMAILPESPRWLLVRGREAAALSVLTHVRGDAHWAARELEEIKTVSREPQGTWRDLRLPWIRPAVIVGGAIAMFSQITGVNAMIYYAPTILTQAGFSTDTAVLATGSSTILVVLMTWFGSVLVDRIGRRRYLLWLIPGSIAALIGMGLLFQSGGPTTTLEQWLVVLCLAGYLMLNCGGFGVCIWLINSEVYPLFIRGKGASVGAFSHWFFDLLVTLTTLSLVTALGAANTFWMYAAISTGALLFIWRYVPETRGKSLEQIEHELREHRFYPFQQKTEH

SEQ ID NO: 23471 - protein, 500 aa, Azotobacter vinelandii
MAEFWTPRTTTRARDMNDKTVAPQQHDISYVLRICAVAALGGLLFGYDTAVISGAVEALQQYFSLSPAETGWAVSNVVVGCIVGALGAGWVAGRLGRKKALVLSAILFTVSAIGAAVVDSFVWFVIYRIVGGLAVGIASTVSPMYMSEVSPKDIRGRALGMQSFAIVGGQVVVFYVNYLIAKGAADTWLVEYGWRWMLGSEVVPCILFCLFVFSIPESPRWQAMVGQDERALRTLRRISNDAHAHHLLNEIKHSLHQDSQGRTQKPNLREAGLALILFVGCMLAMLQQVTGVNVMMYYAPMVLKGVTGSTESALFQTIWIGVMQLVGTIIGTWLIDRVGRLPLMRVGTVGIVASLLLTSYALYAQESGYLALIGMLLFMVLFAISWGVGTWVLISEIFPNHMRSMGMSMAVCSMWIANFLVTQSFPMLNEHPVLIERFHGAFPMWVFAGCCVFCYWFVARFVPETRGVSLERMEEVMLAKLKRQPLADEEESAALRSSRA

SEQ ID NO: 23472 - protein, 481 aa, Azotobacter vinelandii
MMLSKERYKAAYVYWLCCIATLGGVMFGFSTGVISGSVELIQQYFHLSPAETGWIVSSIFVGCVLGALAAGKLADRIGRKSTLLLSTLAFAISAYGTTFADSFAIFSSARIVAGIGIGLASTVVPLYMGEIAPRDIRGKASGIWDLSLLGSQTLVFLVNFLIGKGMTEAWLVEVGWRWMMGAQFVPVALMLVCTLILPESPTWCIDTRRVERAIKVLSKIYPDLNHEEARQFFSARETAGGSLGLGVILRTPVLRYGLIVGCAIGVLQQFTGAAIVMYYAPVILQTGDMSKDALLFQTIFIGLFTGIASFVGMTLFDRFGRRPVMKFGTIGSIVGLLLISYSMYTHHSGYLSIFAALFFMAMFGISWSAGCWVLLSEIFPPRIRSHATGLAVTLMWAFNFLVTQFFPMINEIPVLQESFNGAFTMWIFVAFNLFCLFFLIRYLPETRGVALDDMEALIESHRRKLSRKTGETRTSIAVSDI

SEQ ID NO: 23473 - protein, 82 aa, Chenopodium rubrum
GFAWSWGPLGWLVPSEIFPLEIRSAAQSINVSVNMFFTFVIAQIFLTMLCHLKFGLFLFFAFFVVIMSVFVYLFLPETKGIP

SEQ ID NO: 23474 - protein, 82 aa, Chenopodium rubrum
GFAWSWGPLGWLIPSETFPIETRTAGFAFAVSSNMMFTFLIAQAFLSMLCHMRAYIFIFFSVWIVVMGLFVVFLLPETKGIP

SEQ ID NO: 23475 - protein, 504 aa, Plasmodium falciparum 3D7
MTKSSKDICSENEGKKNGKSGFFSTSFKYVLSACIASFIFGYQVSVLNTIKNFIVVEFEWCKGEKDRLNCSNNTIQSSFLLASVFIGAVLGCGFSGYLVQFGRRLSLLIIYNFFFLVSILTSITHHFHTILFARLLSGFGIGLVTVSVPMYISEMTHKDKKGAYGVMHQLFITFGIFVAVMLGLAMGEGPKADSTEPLTSFAKLWWRLMFLFPSVISLIGILALVVFFKEETPYFLFEKGRIEESKNILKKIYETDNVDEPLNAIKEAVEQNESAKKNSLSLLSALKIPSYRYVIILGCLLSGLQQFTGINVLVSNSNELYKEFLDSHLITILSVVMTAVNFLMTFPAIYIVEKLGRKTLLLWGCVGVLVAYLPTAIANEINRNSNFVKILSIVATFVMIISFAVSYGPVLWIYLHEMFPSEIKDSAASLASLVNWVCAIIVVFPSDIIIKKSPSILFIVFSVMSILTFFFIFFFIKETKGGEIGTSPYITMEERQKHMTKSVV

SEQ ID NO: 23476 - protein, 475 aa, Prunus armeniaca
MSTLKARSVQARASDGDLENLVPSKPQGKSSGTVFPFVGVACLGAILFGYHLGVVNGALEYLSKDLGIAENAVLQGWVVSALLAGATVGSFTGGALADKFGRTRTFQLDVIPLAIGAFLCATSQSVQTMIVGRYLLAVGIGITSAIVPLYISEISPTEIRGALGSVNQLFICIGILGALVAGLPLAANPLWWRTMFGVAIVPSVLLALGMAASPESPRWLFQQGKISEAEKAIKTLYGKERVSEVMHDLTSATQGSVEPEAGWFDLFSSRYWKVVSVGAALFLFQQLAGINAVVYYSTSVFRSAGITSDVAASALVGAANVFGTAVASSLMDRQGRESLLLISFGGMAASMLLLSLSFTWKVLAPYSGPLAVAGTVLYVLSFSLGAGPVPALLLPEIFASRIRAKAVSLSLGMHWISNFVIGLYFLSFVTKFGISSVYLGFAGVCLLAVLYISGNVVETKGRSLEEIERALSVST

SEQ ID NO: 23477 - protein, 522 aa, Arabidopsis thaliana
MPAGGFVVGDGQKAYPGKLTPFVLFTCVVAAMGGLIFGYDIGISGGVTSMPSFLKRFFPSVYRKQQEDASTNQYCQYDSPTLTMFTSSLYLAALISSLVASTVTRKFGRRLSMLFGGILFCAGALINGFAKHVWMLIVGRILLGFGIGFANQAVPLYLSEMAPYKYRGALNIGFQLSITIGILVAEVLNYFFAKIKGGWGWRLSLGGAVVPALIITIGSLVLPDTPNSMIERGQHEEAKTKLRRIRGVDDVSQEFDDLVAASKESQSIEHPWRNLLRRKYRPHLTMAVMIPFFQQLTGINVIMFYAPVLFNTIGFTTDASLMSAVVTGSVNVAATLVSIYGVDRWGRRFLFLEGGTQMLICQAVVAACIGAKFGVDGTPGELPKWYAIVVVTFICIYVAGFAWSWGPLGWLVPSEIFPLEIRSAAQSITVSVNMIFTFIIAQIFLTMLCHLKFGLFLVFAFFVVVMSIFVYIFLPETKGIPIEEMGQVWRSHWYWSRFVEDGEYGNALEMGKNSNQAGTKHV

SEQ ID NO: 23478 - protein, 522 aa, Arabidopsis thaliana
MPAGGFVVGDGQKAYPGKLTPFVLFTCVVAAMGGLIFGYDIGISGGVTSMPSFLKRFFPSVYRKQQEDASTNQYCQYDSPTLTMFTSSLYLAALISSLVASTVTRKFGRRLSMLFGGILFCAGALINGFAKHVWMLIVGRILLGFGIGFANQAVPLYLSEMAPYKYRGALNIGFQLSITIGILVAEVLNYFFAKIKGGWGWRLSLGGAVVPALIITIGSLVLPDTPNSMIERGQHEEAKTKLRRIRGVDDVSQEFDDLVAASKESQSIEHPWRNLLRRKYRPHLTMAVMIPFFQQLTGINVIMFYAPVLFNTIGFTTDASLMSAVVTGSVNVGATLVSIYGVDRWGRRFLFLEGGTQMLICQAVVAACIGAKFGVDGTPGELPKWYAIVVVTFICIYVAGFAWSWGPLGWLVPSEIFPLEIRSAAQSITVSVNMIFTFIIAQIFLTMLCHLKFGLFLVFAFFVVVMSIFVYIFLPETKGIPIEEMGQVWRSHWYWSRFVEDGEYGNALEMGKNSNQAGTKHV

SEQ ID NO: 23479 - protein, 522 aa, Arabidopsis thaliana
MPAGGFVVGDGQKAYPGKLTPFVLFTCVVAAMGGLIFGYDIGISGGVTSMPSFLKRFFPSVYRKQQEDASTNQYCQYDSPTLTMFTSSLYLAALISSLVASTVTRKFGRRLSMLFGGILFCAGALINGFAKHVWMLIVGRILLGFGIGFANQAVPLYLSEMAPYKYRGALNIGFQLSITIGILVAEVLNYFFAKIKGGWGWRLSLGGAVVPALIITIGSLVLPDTPNSMIERGQHEEAKTKLRRIRGVDDVSQEFDDLVAASKESQSIEHPWRNLLRRKYRPHLTMAVMIPFFQQLTGINVIMFYAPVLFNTIGFTTDASLMSAVVTGSVNVAATLVSIYGVDRWGRRFLFLEGGTQMLICQAVVAACIGAKFGVDGTPGELPKWYAIVVVTFICIYVAGFAWSWGPLGWLVPSEIFPLEIRSAAQSITVSVNMIFTFIIAQIFLTMLCHLKFGLFLVFAFFVVVMSIFEYIFLPETKGIPIEEMGQVWRSHWYWSRFVEDGEYGNALEMGKNSNQAGTKHV

SEQ ID NO: 23480 - protein, 514 aa, Arabidopsis thaliana
MAGGAFVSEGGGGGRSYEGGVTAFVIMTCIVAAMGGLLFGYDLGISGGVTSMEEFLTKFFPQVESQMKKAKHDTAYCKFDNQMLQLFTSSLYLAALVASFMASVITRKHGRKVSMFIGGLAFLIGALFNAFAVNVSMLIIGRLLLGVGVGFANQSTPVYLSEMAPAKIRGALNIGFQMAITIGILVANLINYGTSKMAQHGWRVSLGLAAVPAVVMVIGSFILPDTPNSMLERGKNEEAKQMLKKIRGADNVDHEFQDLIDAVEAAKKVENPWKNIMESKYRPALIFCSAIPFFQQITGINVIMFYAPVLFKTLGFGDDAALMSAVITGVVNMLSTFVSIYAVDRYGRRLLFLEGGIQMFICQLLVGSFIGARFGTSGTGTLTPATADWILAFICVYVAGFAWSWGPLGWLVPSEICPLEIRPAGQAINVSVNMFFTFLIGQFFLTMLCHMKFGLFYFFASMVAIMTVFIYFLLPETKGVPIEEMGRVWKQHWFWKKYIPEDAIIGGHDDNNTN

SEQ ID NO: 23481 - protein, 514 aa, Arabidopsis thaliana
MAGGFVSQTPGVRNYNYKLTPKVFVTCFIGAFGGLIFGYDLGISGGVTSMEPFLEEFFPYVYKKMKSAHENEYCRFDSQLLTLFTSSLYVAALVSSLFASTITRVFGRKWSMFLGGFTFFIGSAFNGFAQNIAMLLIGRILLGFGVGFANQSVPVYLSEMAPPNLRGAFNNGFQVAIIFGIVVATIINYFTAQMKGNIGWRISLGLACVPAVMIMIGALILPDTPNSLIERGYTEEAKEMLQSIRGTNEVDEEFQDLIDASEESKQVKHPWKNIMLPRYRPQLIMTCFIPFFQQLTGINVITFYAPVLFQTLGFGSKASLLSAMVTGIIELLCTFVSVFTVDRFGRRILFLQGGIQMLVSQIAIGAMIGVKFGVAGTGNIGKSDANLIVALICIYVAGFAWSWGPLGWLVPSEISPLEIRSAAQAINVSVNMFFTFLVAQLFLTMLCHMKFGLFFFFAFFVVIMTIFIYLMLPETKNVPIEEMNRVWKAHWFWGKFIPDEAVNMGAAEMQQKSV

SEQ ID NO: 23482 - protein, 517 aa, Arabidopsis thaliana
MAGGAFVSEGGGGGNSYEGGVTVFVIMTCIVAAMGGLLFGYDLGISGGVTSMEEFLSKFFPEVDKQMHEARRETAYCKFDNQLLQLFTSSLYLAALASSFVASAVTRKYGRKISMFVGGVAFLIGSLFNAFATNVAMLIVGRLLLGVGVGFANQSTPVYLSEMAPAKIRGALNIGFQMAITIGILIANLINYGTSQMAKNGWRVSLGLAAVPAVIMVIGSFVLPDTPNSMLERGKYEQAREMLQKIRGADNVDEEFQDLCDACEAAKKVDNPWKNIFQQAKYRPALVFCSAIPFFQQITGINVIMFYAPVLFKTLGFADDASLISAVITGAVNVVSTLVSIYAVDRYGRRILFLEGGIQMIVSQIVVGTLIGMKFGTTGSGTLTPATADWILAFICLYVAGFAWSWGPLGWLVPSEICPLEIRPAGQAINVSVNMFFTFLIGQFFLTMLCHMKFGLFYFFGGMVAVMTVFIYFLLPETKGVPIEEMGRVWKQHPFWKRYMPDDAVIGGGEENYVKEV

SEQ ID NO: 23483 - protein, 514 aa, Arabidopsis thaliana
MAGGAFIDESGHGGDYEGRVTAFVMITCIVAAMGGLLFGYDIGISGGVISMEDFLTKFFPDVLRQMQNKRGRETEYCKYDNELLTLFTSSLYLAALFASFLASTITRLFGRKVSMVIGSLAFLSGALLNGLAINLEMLIIGRLFLGVGVGFANQSVPLYLSEMAPAKIRGALNIGFQLAITIGILAANIVNYVTPKLQNGIGWRLSLGLAGVPAVMMLVGCFFLPDTPNSILERGNKEKAKEMLQKIRGTMEVEHEFNELCNACEAAKKVKHPWTNIMQARYRPQLTFCTFIPFFQQLTGINVIMFYAPVLFKTIGFGNDASLISAVITGLVNVLSTIVSIYSVDKFGRRALFLQGGFQMIVTQIAVGSMIGWKFGFNGEGNLSGVDADIILALICLYVAGFAWSWGPLGWLVPSEICPLEIRSAGQSLNVSVNMFFTFFIGQFFLTMLCHMKFGLFYFFAGMVLIMTIFIYFLLPETKGVPIEEMGKVWKEHRYWGKYSNNDDGDDVDDDAYF

SEQ ID NO: 23484 - protein, 481 aa, Malus x domestica
MTSILLGYDIGVMSGASLFIKENLKISDVQVEIMNGTLNLYSLIGSALAGRTSDWIGRRYTIVLAGTIFFIGALLMGFAPNYAFLMFGRFVAGVGVGYALMIAPVYTAEISPASFRGFLTSFPEVFVNIGILLGYVSNYAFSKLPIHLNWRIMLGVGAFPSVILAVGVLAMPESPRWLVMQGRLGDAKRVLQKTSESIEECQLRLDDIKEAAGIPKESNDDVVQVSKRSHGEGVWKELLLHPTPAVRHILIAALGIHFFEQSSGIDSVVLYSPRIFEKAGITSYDHKLLATVAVGVVKTICILVATVFLDKFGRRPLLLTSVAGMVFSLSCLGASLTIVDQQHGKIMWAIVLCITMVLLNVAFFSIGLGPITWVYSSEIFPLQLRAQGCSMGVAVNRVTSGVISMTFISLYKAITIGGAFFLYAGIAAVGWVFFYMLYPETQGRTLEDMEVLFGKYHKWREANALLQKAKQVDGDDKGQVH

SEQ ID NO: 23485 - protein, 76 aa, Prunus persica
WGPLGWLVPSEIFPLEIRSAAQSVNVSVNMIFTFLVAQIFLTMLCHLKFGLFLFFAFFVFVMSIFIYYFLPGTKGV

SEQ ID NO: 23486 - protein, 76 aa, Prunus persica
WGPLGWTVPSEIFPLETRSAGQSITVAVNLLFTFIIAQSFLALLCALKFGIFLFFAGWITVMTVFVYVFLPGTKGV

SEQ ID NO: 23487 - protein, 530 aa, Poncirus trifoliata
MIESGAYNNYTLVQDPLLESRKRSLALTGLLLVLIYFGSTMIPNIWTAFKFTGATTAVSLGFIFPPLVALRLRKEGPGLSLGEKFLSGLMLVLAILGWLLTHSLIAKAVVAACIGAKFGIDGNPGELPKWYAIVVVLFFYIYVAGFAWSWGPLGWLVPSEILPLKIRSAAQSVNVSVNMLCTFLVAQVFLNKLCHLKFGLFLFFGFFVMVMSFFIYFFLAETKGIPIEEMDWLTNDCTDNDENTTLHKLLQLHKLLRLRSPFFLLQDLRSQKQITGAGGFFGKNPPMLNGLGRGETIALLRDRAFFLNDKLLVGMRLCNVGPSSRKNTLRYSQPEAIPPPYDCELNGNRGGQASGSGENRSSDGTEIPGEKGGNEETIQSLGGDIHLPTRFVTPRRLFFFTLHVSGRHLFVYLTLSMFSDSWGLVSKLDDEPLVKVEIALVNAFNCQDLLSPTSLVESRLVDVVAGMDNKIPSAMSRKRAQVSGESSIAPFSQKKSNTGPSKTSAPALLNIVNKEASGVRTLHGNNCITE

SEQ ID NO: 23488 - protein, 518 aa, Glycine max; identical to SEQ ID NO: 638

SEQ ID NO: 23489 - protein, 519 aa, Glycine max
MPAVGGISNGGGKEYPGSLTPFVTVTCIVAAMGGLIFGYDIGISGGVTSMDPFLLKFFPSVFRKKNSDKTVNQYCQYDSQTLTMFTSSLYLAALLSSLVASTVTRRFGRKLSMLFGGLLFLVGALINGFAQHVWMLIVGRILLGFGIGFANQSVPLYLSEMAPYKYRGALNIGFQLSITVGILVANVLNYFFAKIHGGWGWRLSLGGAMVPALIITIGSLVLPDTPNSMIERGDREKAKAQLRRVRGIDDVEEEFNDLVAASESSRKVEHPWRNLLQRKYRPHLTMAVLIPFFQQLTGINVIMFYAPVLFSSIGFKDDSALMSAVITGVVNVVATCVSIYGVDKWGRRALFLEGGVQMVICQAVVAAAIGAKFGIDGNPGDLPKWYAVVVVLFICIYVSAFAWSWGPLGWLVPSEIFPLEIRSAAQSINVSVNMFFTFLIAQVFLTMLCHMKFGLFIFFAFFVLIMTFFIYFFLPETKGIPIEEMNQVWKAHPFWSRFVENDDYGNGVEMGRGTAIKEV

SEQ ID NO: 23490 - protein, 518 aa, Medicago truncatula
MAGGGIPIGGGNKEYPGNLTPFVTITCIVAAMGGLIFGYDIGISGGVTSMDPFLKKFFPAVYRKKNKDKSTNQYCQYDSQTLTMFTSSLYLAALLSSLVASTITRRFGRKLSMLFGGLLFLVGALINGFANHVWMLIVGRILLGFGIGFANQPVPLYLSEMAPYKYRGALNIGFQLSITIGILVANVLNYFFAKIKGGWGWRLSLGGAMVPALIITIGSLVLPDTPNSMIERGDRDGAKAQLKRIRGIEDVDEEFNDLVAASEASMQVENPWRNLLQRKYRPQLTMAVLIPFFQQFTGINVIMFYAPVLFNSIGFKDDASLMSAVITGVVNVVATCVSIYGVDKWGRRALFLEGGAQMLICQVAVAAAIGAKFGTSGNPGNLPEWYAIVVVLFICIYVAGFAWSWGPLGWLVPSEIFPLEIRSAAQSVNVSVNMLFTFLVAQVFLIMLCHMKFGLFLFFAFFVLVMSIYVFFLLPETKGIPIEEMDRVWKSHPFWSRFVEHGDHGNGVEMGKGAPKNV

SEQ ID NO: 23491 - protein, 82 aa, Phaseolus vulgaris
GFAWRWGPLGWLVPSEIFPLEIRSAAQSINVSVNMFFTFVIAQVFLTMLCHMKFGLFIFFAFFVVVMTFFIFFFLPETKGIP

SEQ ID NO: 23492 - protein, 516 aa, Vicia faba
MPAAGIPIGAGNKEYPGNLTPFVTITCVVAAMGGLIFGYDIGISGGVTSMNPFLEKFFPAVYRKKNAQHSKNQYCQYDSETLTLFTSSLYLAALLSSVVASTITRRFGRKLSMLFGGLLFLVGALINGLAQNVAMLIVGRILLGFGIGFANQSVPLYLSEMAPYKYRGALNIGFQLSITIGILVANILNYFFAKIKGGWGWRLSLGGAMVPALIITIGSLILPDTPNSMIERGDRDGAKAQLKRIRGVEDVDEEFNDLVAASETSMQVENPWRNLLQRKYRPQLTMAVLIPFFQQFTGINVIMFYAPVLFNSIGFKDDASLMSAVITGVVNVVATCVSIYGVDKWGRRALFLEGGVQMLICQVAVAVSIAAKFGTSGEPGDLPKWYAIVVVLFICIYVAGFAWSWGPLGWLVPSEIFPLEIRSAAQSVNVSVNMLFTFLVAQIFLTMLCHMKFGLFLFFAFFVVVMTIYIYTMLPETKGIPIEEMDRVWKSHPYWSRFVEHDDNGVEMAKGGVKNV

SEQ ID NO: 23493 - protein, 523 aa, Ricinus communis
MPAVGGIPPSGGNRKVYPGNLTLYVTVTCVVAAMGGLIFGYDIGISGGVTSMDSFLKKFFPSVYRKKKADESSNQYCQYDSQTLTMFTSSLYLAALIASLVASTITRKFGRKLSMLFGGVLFCAGAIINGAAKAVWMLILGRILLGFGIGFANQSVPLYLSEMAPYKYRGALNIGFQLSITIGILVANVLNYFFAKIKGGWGWRLSLGGAMVPALIITVGSLVLPDTPNSMIERGQHEEARAHLKRVRGVEDVDEEFTDLVHASEDSKKVEHPWRNLLQRKYRPHLSMAIAIPFFQQLTGINVIMFYAPVLFDTIGFGSDAALMSAVITGLVNVFATMVSIYGVDKWGRRFLFLEGGVQMLICQAIVAACIGAKFGVDGAPGDLPQWYAVVVVLFICIYVSGFAWSWGPLGWLVPSEIFPLEIRSAAQSVNVSVNMFFTFVVAQVFLIMLCHLKFGLFIFFSFFVLIMSIFVYYFLPETKGIPIEEMGQVWKQHWYWSRYVVDEDYPNGGLEMGKEGRIPKNV

SEQ ID NO: 23494 - protein, 513 aa, Oryza sativa (japonica cultivar-group)
MAGGAMTDTDGAHKNYPGKMTIFVFLACLVASSGGLIFGYDIGISGGVTSMDSFLIKFFPSVYAKEKEMVETNQYCKFDSELLTLFTSSLYLAALIASLFASVITRKFGRRITMLGGGVIFLVGAILNGAAADVAMLIIGRILLGIGVGFSNQAVPLYLSEMAPARMRGMLNISFQLMITVGILAANLINYFTDKIAGGWGWRVSLGLAAVPAVIMAGGSLFLPDTPNSLLSRGKENEARAMLRRIRGTDDVGPEYDDLVAASEASKAIENPWRTLLERRYRPQLVMSVLIPTLQQLTGINVVMFYAPVLFKTIGFGGTASLMSAVITGLVNMFATFVSIATVDRLGRRKLLLQGGVQMIFAQFILGTLIAVKFGTAGVANISRGYAIVVVLCICVFVSAFAWSWGPLGWLVPSEIFPLEIRSAAQSVVVVFNMAFTFIIAQIFLMMLCHLKFGLFYFFGAMELIMTGFVFFFLPETKGIPIEEMDRIWGKHWYWRRFVGAGAGGKVEITSTV

SEQ ID NO: 23495 - protein, 512 aa, Oryza sativa (japonica cultivar-group)
MENAGAGDGAPKHYPGKMTVFVFIACLVASSGGLIFGYDIGISGGVTSMDPFLSRFFPSVYAKEKEVVDTNQYCKFDSEPLTLFTSSLYLAALIASLFASVITRKLGRKMTMLGGGFIFLIGAVLNGAAVNVAMLIIGRILLGIGVGFSIQAVPLYLSEMAPAKMRGMLNIIFQLMITVGILFANLINYFTDKIAGGWGWRVSLGLAAVPAVIMTVGSILLPDTPNSLLSRGKENEARTMLRRIRGTEDIGPEYDDLVAASEATKAIENPWRTLLERRYRPQLVMSVLIPTLQQLTGINVVMFYAPVLFKTIGFGGTASLMSAVITGLVNMFATFVSIATVDRFGRRVLFIQGGIQMIIAQFILGTLIAVKFGTAGVANISQGYAIVVVLFICLFVSAFAWSWGPLGWLVPSEIFPLEIRSAAQSVVVVFNMAFTFFIAQIFLMMLCRLKFGLFFFFGAMELIMTGFVLVFLPETKGIPIEEMDRIWGEHWYWSRFVGAGRNRVMQMASTNV

SEQ ID NO: 23496 - protein, 152 aa, Apium graveolens
AIMFYAPVLFSTLGFKDNASLYSAVITGAVNVLSTVVSIYVVDKLGRRILLLEAGVQMFIAQIIIAIVLGIKVTDHSDNLGTAYAVIVVVMICTFVSAFAWSWGPLGWLIPSETFPLETRSAGRSVTVCVNLLFTFVIAQAFLSMLCHFKFG

SEQ ID NO: 23497 - protein, 523 aa, Nicotiana tabacum
MAGGGGIGPGNGKEYPGNLTLYVTVTCIVAAMGGLIFGYDIGISGGVTSMDSFLSRFFPSVFRKQKADDSTNQYCKFDSQTLTMFTSSLYLAALLSSLVASTVTRKLGRRLSMLCGGVLFCAGALINGFAQNVAMLIVGRILLGFGIGFANQSVPLYLSEMAPYKYRGALNLGFQLSITIGILVANVLNYFFAKIHWGWRLSLGGAMVPALIITIGSLFLPETPNSMIERGNHDEAKARLKRIRGIDDVDEEFNDLVVASEASRKIENPWRNLLQRKYRPHLTMAIMIPFFQQLTGINVIMFYAPVLFKTIGFGADASLMSAVITGGVNVLATVVSIYYVDKLGRRFLFLEGGIQMLICQIAVSICIAIKFGVNGTPGDLPKWYAIVVVIFICVYVAGFAWSWGPLGWLVPSEIFPLEIRSAAQSINVSVNMIFTFIVAQVFLTMLCHLKFGLFLFFAFFVVIMTVFIYFFLPETKNIPIEEMVIVWKEHWFWSKFMTEVDYPGTRNGTSVEMSKGSAGYKIV

SEQ ID NO: 23498 - protein, 510 aa, Petunia x hybrida
MAGGFAAGSGGGDYEGKVTTFGIMTCLVAATGGLLFGYDIGISGGVTSMDEFLLKFFPNVYHKEKALKAGGNQYCKFDDHLLQLFTSSLYLAALVASFAASITTKAFGRKISMLIGGLIFLVGAVLNGAAMNLAALIIGRLLLGVGIGYANQSVPVYLSEMAPPKLRGALNVCFQMAVTLGIFVANMVNYGTSSMKKNGWRVSLVLAAVPAIIMTVGAVFLPDTPNSLIDRGQKEKAKAMLQKIRGTNNVDNEFEDLIIASDMSKLVTDPWGNIMKPRYRPQLTIAVLIPFFQQLTGINVIMFYAPVLFKTLGFGDEAALMTAVITGLVNVFATLISIFTVDRFGRRFLFLAGGLLMLICQAAVGSVIGSVFGTDGLGTFSKGLGNVTVGLICLYVAAFAWSWGPLGWLVPSEVFPMEIRSAGQSITVSVNMFFTFVIGQLFLTMLCEMKFGLFFFFAGFVVLMTLFIFFFLPETKGIPIEEVNRIWKNHWFWKSYVPNDDDDHHSKNQV

SEQ ID NO: 23499 - protein, 205 aa, Olea europaea
SGGVTSMDDFLKKFFPAIYERKLHAKENNYCKYDDQLLQLFTSSLYLAALVASFGASKACNVLGRKPTIGLASILFILGAIASGIAPNKALLIIGRILFGFGVGFGNESVPLFLSEVAPMQHRGAVNILFQLFVTIGILIANLVNYAVSSIHPNGWRIALGLAGVPAIFLFIGSLIITETPSSLIERGKEFEGKEVLRKIRGVDD

SEQ ID NO: 23500 - protein, 464 aa, Dictyostelium discoideum
MKYLANISNKSWLIVTQSCLGGLVFGYATGIIVGTLDPIAIKFNTSTVIKGVIVCSILVGALIGSFAGGFAANKFGRKPLLLFTALTCICGAIGSGLGENVATICILRFIHGLGVGSSSSVCPLMVAEMVPIKRRGIFGSFFQISITVGILIANILAYVIKGNWRLMFCLGSIPGGLLFFVWFVIAESPVFLAKKSAKTTTTTNQESNENQIETQPQNNQGTKFTIIFSKKMRKPMLVGVLLATLAQLTGINAFMYFSNTIFKDAGINNPEIASVALQVWNVLTTLIAIFLVDKLGRRVLLFTGSIVMTTCDLLIALFFVVLTGSAKGWSSIVFLFIFVGAFEASIGTLFWFVINEILPEDSKSIGAPVINACQWTFNTILSFFFLVVVEYLGQSTMFWIFGGIGVFCTIFLYFNLPKSLGTSKNTTEDISIPQDQLEQTIEELENEKNNEINSSKLPPAQMQA

SEQ ID NO: 23501 - protein, 518 aa, Oryza sativa
MAGGAVVSTGAGKDYPGKLTLFVFFTCVVAATGGLIFGYDIGISGGVTSMDPFLRKFFPEVYRKKQMADKNNQYCKYDNQLLQTFTSSLYLAALVSSFFAATVTRVLGRKWSMFAGGLTFLIGAALNGAAENVAMLIVGRILLGVGVGFANQSVPVYLSEMAPARLRGMLNIGFQLMITIGILAAELINYGTAKIKAGWGWRVSLALAAVPAAIITLGSLFLPDTPNSLIDRGHPEAAERMLRRIRGSDVDVSEEYADLVAASEESKLVQHPWRNILRRKYRAQLTMAICIPFFQQLTGINVIMFYAPVLFDTLGFKSDASLMSAVITGLVNVFATLVSIFTVDRLGRRKLFLQGGAQMVVCQVVVGTLIAVKFGTSGIGDIPKGYAAVVVLFICMYVAGFAWSWGPLGWLVPSEIFPLEIRPAGQSINVSVNMLFTFVIAQAFLTMLCHMKFGLFYFFAGWVVIMTVFIALFLPETKNVPIEEMVLVWKSHWFWRRFIGDHDVHVGANHVSNNKLQP

SEQ ID NO: 23502 - protein, 518 aa, Oryza sativa; identical to SEQ ID NO: 23501

SEQ ID NO: 23503 - protein, 518 aa, Oryza sativa; identical to SEQ ID NO: 23501

SEQ ID NO: 23504 - protein, 518 aa, Oryza sativa; identical to SEQ ID NO: 23501

SEQ ID NO: 23505 - protein, 518 aa, Oryza sativa
MAGGAVVSTGAGKDYPGKLTLFVFFTCVVAATGGLIFGYDIGISGGVTSMDPFLRKFFPEVYRKKQMADKNNQYCKYDNQLLQTFTSSLYLAALVSSFFAATVTRVLGRKWSMFAGGLTFLIGAALNGAAENVAMLIVGRILLGVGVGFANQSVPVYLSEMAPARLRGMLNIGFQLMITIGILAAELINYGTAKIKAGWGWRVSLALAAVPAAIITLGSLFLPDTPNSLIDRGHPEAAERMLRRIRGSDVDVSEEYADLVAASEESKLVQHPWRNILRRKYRAQLTMAICIPFFQQLTGINVIMFYAPVLFDTLGFKSDASLMSAVITGLVNVFATLVSIFTVDRLGRRKLFLQGGAQMVVCQVVVGTLIAVKFGTSGIGDIPKGYAAVVVLFICMYVAGFAWSWGPLGWLVPSEIFPLEIRPAGQSINVSVNMLFTFVIAHAFLTMLCHMKFGLFYFFAGWVVIMTAFIALFLPETKNVPIEEMVLVWKSHWFWRRFIGDHDAHVGAHHVSSPKLQP

SEQ ID NO: 23506 - protein, 544 aa, Triticum aestivum
  unsure (1)..(544): unsure at all Xaa locations
MPGGGFAVSAPSGVEFEAKITPIVIISCIMAATGGLMFGYDVGISGGVTSMDDFLREFFPAVLRRXXNQDKESNYCKYDNQGLQLFTSSLYLAGLTATFFASYTTRRLGRRLTMLIAGVFFIIGVIFNGAAQNLAMLIIGRILLGCGVGFANQAVPLFLSEIAPTRIRGGLNILFQLNVTIGILFANLVNYGTSKIHPWGWRLSLSLAGIPAAMLTLGALFVTDTPNSLIERGHLEEGKAVLKRIRGTDNVEPEFNEIVEASRIAQEVKHPFRNLLQRRNRPQLVIAVLLQIFQQFTGINAIMFYAPVLFNTLXGFKSDASLYSAVITGAVNVLATLVSVYAVDRAGRRALLLEAGVQMFLSHAAIAGALGIKGTXDKPDNPGHGWAILGAAMVCTYGAXSFPWPGGPLGWLIPSETFPLETRSAGQSVTVCVNLLFTFLIAQAFLSMFCHLKFAIFILLSAWVLVMSVFVLFFLPETKNVPMEEMTDKVWKQHWLWKRFMDDDDQHHNIANGKNAXRMKSVAPTMXRCLPACTTRLRKRKDGY

SEQ ID NO: 23507 - protein, 201 aa, Triticum aestivum
  unsure (1)..(201): unsure at all Xaa locations
MAGGAVVNTSGGKDYPGRLTLFVFFTCVVAATGGLIFGYDIGISGGVTSMNPFLKKFFPEVYNKKQMKGSANQYCKYDNQLLQTFTSSLYLAGLVSSFFAATVTRVVGRKWSMFTGGLTFLIGAALNGAAENIAMLIVGRILLGVGVGFANQSVPVYLSEMAPARLRGMLNIGFQLMITIGILAAALINYXTNKIKAGYXW

SEQ ID NO: 23508 - protein, 212 aa, Triticum aestivum
  unsure (1)..(212): unsure at all Xaa locations
XXDDASLMSAVITGLVNVFATFVSIVTVDRLGRRKLFLQGGTQMLACQIVVGSLIGAKFGFTGVADIPKGYAAVXVVFFICAYVAGFAWSWGPLGWLVPSEIFPLEIRSAGQSITVSMNMLCTFIIAQAFLPMLCRFKFMLFFFFGAWVVVMTLFVAYFLPETKNVPIEEMVLXVWKAHWYWGRFIRDEDVHVGGADVEMRSNGKVQAAKLP

SEQ ID NO: 23509 - protein, 500 aa, Novosphingobium aromaticivorans
MRALRAGATVHVWRRPASRGTDTNPQREGEKGMSQQPQPGGNLGFIGLIVAVATIGGFMFGYDSGAINGTQDGLKHAFGLGEAELGLTVSALLPGCALGAFLAGRFADIWGRRAVMMMAAALFILSALGSGAAPSAIVLAVARFFAGAAVGAASVLSPAYISEVTPAHVRGRLSSAQQVMIISGLTGAFLANYWLAGAAGSSLGAFWCGYPAWRWMFWVQAAPAILFLVTLLLIPESPRFLVAKGRTEEARSVLARLFGDATADAKLGEIRASLAADHQPSLADIRKPGGGWRPIVWVGIGLAVFQQLVGINVVFYYGAVLWQAVGFSEADALKINILSGVVSIAACLVSIGLVDKLGRKPLLLIGSAGMTATLGALAWCFAQASTGPDGALVLPEGVGTIALYAANIYVVFFNMSWGPVMWVMLGEMFPNQMRGSALAVAGAAQWLANFAVSSSFPWLAGNIGLPVTYAAYTLFAAISLVFVWTSVKETKGKELEAMEG

SEQ ID NO: 23510 - protein, 557 aa, Schizosaccharomyces pombe
MDFNNIPLATIKSSDDKGKDFIVEMTTRPSETKKKVPFSEDMREIPSLPNEEEANATDPQANEVADENGEGFEAEKISSWIWVLSAVAGISGLLFGYDTGVISGALAVLGSDLGHVLSSGQKELITSATSFAALISATTSGWLADWVGRKRLLLCADAIFVIGSVIMAASRNVAMMVVGRFIVGYGIGLTSLIVPMYITELAPARLRGRLVIIYVVFITGGQLIAYSLNAAFEHVHQGWRIMFGIGAAPALGQLISLFWTPESPRYLLRHNHVEKVYKILSRIHPEAKPAEIAYKVSLIQEGVKVDFPEGNKFQHFFHSLKVLFTVPSNRRSLFIGCFLQWFQQFSGTNAIQYFSAIIFQSVGFKNSISVSIVVGATNFVFTIVAFMFIDRIGRRRILLCTSAVMIAGLALCAIAYHFLPADTTQNTNSGWQYVVLASIIIFLASYASGIGNIPWQQAELFPMEVRALGAGFSTAINWVGNLIISASFLTMMESITPTGTFALFAGFCFVGLVTSYFTYPELAGMSIENIHKLLEKGFWQAVKESTKRVRKGRIDEA

SEQ ID NO: 23511 - protein, 567 aa, Saccharomyces cerevisiae
MNSTPDLISPQKSSENSNADLPSNSSQVMNMPEEKGVQDDFQAEADQVLTNPNTGKGAYVTVSICCVMVAFGGFVFGWDTGTISGFVAQTDFLRRFGMKHKDGSYYLSKVRTGLIVSIFNIGCAIGGIILAKLGDMYGRKMGLIVVVVIYIIGIIIQIASINKWYQYFIGRIISGLGVGGIAVLSPMLISEVAPKEMRGTLVSCYQLMITLGIFLGYCTNFGTKNYSNSVQWRVPLGLCFAWALFMIGGMTFVPESPRYLVEAGQIDEARASLSKVNKVAPDHPFIQQELEVIEASVEEARAAGSASWGELFTGKPAMFKRTMMGIMIQSLQQLTGDNYFFYYGTTVFNAVGMSDSFETSIVFGVVNFFSTCCSLYTVDRFGRRNCLLYGAIGMVCCYVVYASVGVTRLWPNGEGNGSSKGAGNCMIVFACFYIFCFATTWAPIAYVVISETFPLRVKSKAMSIATAANWLWGFLIGFFTPFITGAINFYYGYVFMGCMVFAYFYVFFFVPETKGLTLEEVNDMYAEGVLPWKSASWVPTSQRGANYDADALMHDDQPFYKKMFGKK

SEQ ID NO: 23512 - protein, 564 aa, Saccharomyces cerevisiae
MSSAQSSIDSDGDVRDADIHVAPPVEKEWSDGFDDNEVINGDNVEPPKRGLIGYLVIYLLCYPISFGGFLPGWDSGITAGFINMDNFKMNFGSYKHSTGEYYLSNVRMGLLVAMFSIGCAIGGLIFARLADTLGRRLAIVIVVLVYMVGAIIQISSNHKWYQYFVGKIIYGLGAGGCSVLCPMLLSEIAPTDLRGGLVSLYQLNMTFGIFLGYCSVYGTRKYDNTAQWRVPLGLCFLWALIIIIGMLLVPESPRYLIECERHEEARASIAKINKVSPEDPWVLKQADEINAGVLAQRELGEASWKELFSVKTKVLQRLITGILVQTFLQLTGENYFFFYGTTIFKSVGLTDGFETSIVLGTVNFFSTIIAVMVVDKIGRRKCLLFGAAGMMACMVIFASIGVKCLYPHGQDGPSSKGAGNAMIVFTCFYIFCFATTWAPVAYIVVAESFPSKVKSRAMSISTACNWLWQFLIGFFTPFITGSIHFYYGYVFVGCLVAMFLYVFFFLPETIGLSLEEIQLLYEEGIKPWKSASWVPPSRRGISSEESKTEKKDWKKFLKFSKNSD

SEQ ID NO: 23513 - protein, 500 aa, Thermoplasma volcanium
MDIFHIFSDKRLNTVYLSKNMEYHEVIEKLDFSKVTRFYWLLTLLATIGGFLFGYDTSNIGTALVFIPYPVQGFIEGYLVAGASLGAAVGALIAAGLTDRYGRKYLLIADAAIYAAGAILSAFTIDLAMLLLSRTLIGLAVGADSGIATAYISEYAPKDRRGSLGILQQWMITIGILGAYIVGMATLYAAPGLASVLDWRIMLGVAAIPALIGLGFRFMMPESPRWLMINGKYKEASEAFKKLGLNLSVDELKEVKFRQRAKITNGVKRAFLVVALFFVFQQITGINIPFYYGPIVIEKLHLFGSATQSLVFTQIYAVAAATILAVINVAATYIGFRYIDTVGRRKLALLGYSGMTFFGLLGGLLLYLKFDVGLLIAFAGFIIFFAFGVGGTGWMIQGEYFPTNMRGLYASLGAFVDWIANFAIIEIFPVLEALITIKNVMFVFGILSLIAVLIFYYIMPETKELSVEQISDLFENNGLSSLRKASMSYNKSSSGSSGKK

SEQ ID NO: 23514 - protein, 480 aa, Thermoplasma volcanium
MEYHEVIEKLDFSKVTRFYWLLTLLATIGGFLFGYDTSNIGTALVFIPYPVQGFIEGYLVAGASLGAAVGALIAAGLTDRYGRKYLLIADAAIYAAGAILSAFTIDLAMLLLSRTLIGLAVGADSGIATAYISEYAPKDRRGSLGILQQWMITIGILGAYIVGMATLYAAPGLASVLDWRIMLGVAAIPALIGLGFRFMMPESPRWLMINGKYKEASEAFKKLGLNLSVDELKEVKFRQRAKITNGVKRAFLVVALFFVFQQITGINIPFYYGPIVIEKLHLFGSATQSLVFTQIYAVAAATILAVINVAATYIGFRYIDTVGRRKLALLGYSGMTFFGLLGGLLLYLKFDVGLLIAFAGFIIFFAFGVGGTGWMIQGEYFPTNMRGLYASLGAFVDWIANFAIIEIFPVLEALITIKNVMFVFGILSLIAVLIFYYIMPETKELSVEQISDLFENNGLSSLRKASMSYNKSSSGSSGKK

SEQ ID NO: 23515 - protein, 518 aa, Saccharum hybrid cultivar H65-7052
MAGGGMAALGVKTERAAQYKGRMTLAVAMTCLVAAVGGAIFGYDIGISGGVTSMDPFLEKFFPVVFHRKNSGGKNNYCKYDNQGLAAFTSSLYLAGLVASLVASPVTRNYGRKASIVCGGVSFLIGAALNVAAVNLAMLILGRIMLGVGIGFGNQAVPLYLSEMAPAHLRGGLNIMFQLATTLGIFTANLINYGTQNIKPWGWRLSLGLAAAPALLMTLAGLFLPETPNSLIERGRVEEGRRVLERIRGTADVDAEFTDMVEASELANTIEHPFRNILEPRNRPQLVMAVCMPAFQILTGINSILFYAPVLFQSMGFGGNASLYSSVLTGAVLFSSTLISIGTVDRLGRRKLLISGGIQMIVCQVIVAVILGAKFGADKQLSRSYSIAVVVVICLFVLAFGWSWGPLGWTVPSEIFPLETRSAGQSITVAVNLLFTFAIAQAFLSLLCAFKFGIFLFFAGWITVMTVFVCVFLPETKGVPIEEMVLLWRKHWFWKKVMPVDMPLEDGWGAAPASNNHK

SEQ ID NO: 23516 - protein, 287 aa, Saccharum hybrid cultivar H65-7052
IERGRVEEGRRVLERIRGTADVDAEFTDMVEASELANTIEHPFRNILEPRNRPQLVMAVCMPAFQILTGINSILFYAPVLFQSMGFGGNASLYSSVLTGAVLFSSTLISIGTVDRLGRRKLLISGGIQMIVCQVIVAVILGAKFGADKQLSRSYSIAVVVVICLFVLAFGWSWGPLGWTVPSEIFPLETRSAGQSITVAVNLLFTFAIAQAFLSLLCAFKFGIFLFFAGWITVMTVFVCVFLPETKGVPIEEMVLLWRKHWFWKKVMPADMPLEDGWGAAPASNNHK

SEQ ID NO: 23517 - protein, 530 aa, Aspergillus niger
MAEGFVDASRVEAPVTLKTYLMCAFAAFGGIFFGYDSGYISGVMGMRYFIEEFEGLDYNTTPTDSFVLPSWKKSLITSILSAGTFFGALIAGDLADWFGRRTTIVSGCVVFIVGVILQTASTSLGLLVAGRLVAGFGVGFVSAIIILYMSEIAPRKVRGAIVSGYQFCITIGLMLASCVDYGTENRLDSGSYRIPIGLQLAWALILGGGLLCLPESPRYFVKKGDLAKAAEVLARVRGQPQDSDYIKDELAEIVANHEYEMQVIPEGGYFVSWMNCFRGSIFSPNSNLRRTVLGTSLQMMQQWTGVNFVFYFGTTFFQSLGTIDDPFLISMITTIVNVCSTPVSFYTIEKFGRRSLLLWGALGMVICQFIVAIVGTVDGSNKHAVSAEISFICIYIFFFASTWGPGAWVVIGEIFPLPIRSRGVALSTASNWLWNCIIAVITPYMVDKDKGDLKAKVFFIWGSLCACAFVYTYFLIPETKGLTLEQVDKMMEETTPRTSAKWTPHGTFTAEMGLTANAVAEKATAVHQEV

SEQ ID NO: 23518 - protein, 583 aa, Neurospora crassa
MGGGGGSGAAGFYDAALQRREAVMGKSGPAALVKNFRVFSIACFACIGGVLYGYNQGMFSGVLAMPAFQKHMGEYDPIDENASQTKKGWLTAILELGAWLGTLLSGFMAEVLSRKYGVLVACLVFMLGVVIQATSISGGHETILAGRFITGMGVGSLAMIIPIYNSEVAPPEVRGALVALQQLAICFGIMVSFWIDYGTNYIGGTKLETQSDAAWLVPVCLQLAPALILFFGMMFMPFSPRWLIHHGREAEARKILSTLRGLPQDHELVELEFLEIKAQSLFEKRSIAELFPELREQTAWNTFKLQFVAIEKLFRTKAMFRRVIVATVTMFFQQWSGINAILYYAPQIFKQLGLSGNTTSLLATGVVGIVMFIATVPAVLWIDRVGRKPVLTIGALGMATCHIIIAVIVAKNVDQWETHKAAGWAAVAMVWLFVIHFGYSWGPCAWIIVAEIWPLSTRPYGVSLGASSNWMNNFIVGQVTPDMLKAIPYGTYIIFGLLTYMGAAFIWFFVPETKRLTLEEMDMIFGSEGTAQADNERMEEINAEIGLTRFLQGGSGANQGAADGSDTGYDAEKGKSEHYSQHV

SEQ ID NO: 23519 - protein, 539 aa, Neurospora crassa
MEHDHSASDIEKEAVTVARPQGDVTRVEAPVTLKAYMMCVFAAFGGIFFGYDSGYISGVMGMKYFIETINGPGATFLPSKEKSLITSILSAGTFFGALMGGDLADWVGRRPTIIFGCLVFIVGVVLQTASQSLGLIVAGRLVAGFGVGFVSAIIILYMSEIAPRKVRGAMVSGYQFCICLGLLLASCVDYGTQNRTDSGSYRIPIGLQMAWALILATGIFFLPESPRFFVKKGKLDKAAGVLSRLRDQPLDSDYVRDELAEIVANHEFEMTVVPYGNYFQQWANCFRGSIWQGGSYLRRTILGTSMQMMQQWTGINFIFYFGTTFFQQLGTIDNPFLMSLVTTLVNVCSTPISFYTMEKLGRRTLLIWGALGMLICEFIVAIVGTCRPDDTMAIKAMLAFICIYIFFFATTWGPASWVVIGEVFPLPIRAKGVALSTASNWLWNCIIAVITPYMVDEDKGNLGPKVFYIWGGLCTCCFIYAYLLVPETKGLTLEQVDQMLSESTPRTSTKWKPHTTYAAEMGMTEKTVAGHAENRSDSE

SEQ ID NO: 23520 - protein, 543 aa, Podospora anserina
MTLLSLKEDRPTPKAVYNWRVYTCAAVASFAACTIGYDSAFIGGTLALPSFEEEFDFASYSESGRALLKANIVSVYQAGAFFGSLFAYVTSHFGGRRISLFIFSVVFCIGAGIMLAANGDRGMAPIIAGRVLAGIGVGGCSNMVPIYISELSPPAVRGRLVGIYELGWQMGGLVGFWINYGVNTTLAPSHKQWIIPFAVQLIPAGLLLIGAFWLRESPRWLFANGKKEEGLKVLCWMRNLEPTDTYILEEVSYIEADLERFEREVGKGFWKPFLSLKQRKVQWRFFIGGILFLFQNGSGINAINYYSPTVFRSIGIDGVNTGLLTTGIFGVVKTVLTIIWLLWLVDLAGRRRMLFIGATGGSLCMWYIGAYIKLAKPEQSASGELTSAGISAVFFFYLWTAFYTPSWNGTPWVINSEMFDQNTRSLGQASAAANNWFWNFLISRFTPQMFLKMEYGVYFFFASLMILSIIFIFFFVPETKSIPLEAMDRLFEIKPVHRANKLLMAELQQTSDMGHGAEESVGKDSSSTDEKMRQAGFVQAENV

SEQ ID NO: 23521 - protein, 517 aa, Agaricus bisporus
GLIGGILSLRSFQEYLGINTKNAVKKAILDGNIISVLQAGCFFGALGTGYLSSRFGRRPCLIASGIVYITGGLLQCTVGLGPSQAAALHVFYIGRFISGIGVGMVSTLVPLYISECVPRTIRGRCTGTLQFATNSGLMLGFWVNYSVSKNVPFGEMQWRIPLIIQMIPSLLFIIAMFFQPESPRWLVEHGKHKEAATVLARTGGKDVDHPSVVQTLEEIKQEFVASKQPSFLKQIRLVGESRAVALRCFIPPLVMFFQQWTGTNAINLYSPEVFRHLGIHGTSGALFATGVYGVVKVVSVALALTFAVERFGRKRGLIFGGIGQALMMFWLGGYSATHQDGTVSPASHVSIVALYLYGAFFSMGWGPLPWVVAGEVAPNHVRSFALSIAVGTHWLFGFVISKVTPIMLDRIKYGTFLLFGFCCMIVATWAYFCLPETSGFALEDIKYLFERDVIIRSLQDAPGGKIFLGGRRVESVASLKERRVGVAGEQGEKITGLNSELEDVSSKKSTLKETSSV

SEQ ID NO: 23522 - protein, 473 aa, Zymomonas mobilis
MSSESSQGLVTRLALIAAIGGLLFGYDSAVIAAIGTPVDIHFIAPRHLSATAAASLSGMVVVAVLVGCVTGSLLSGWIGIRFGRRGGLLMSSICFVAAGFGAALTEKLFGTGGSALQIFCFFRFLAGLGIGVVSTLTPTYIAEIRPPDKRGQMVSGQQMAIVTGALTGYIFTWLLAHFGSIDWVNASGWCWSPASEGLIGIAFLLLLLTAPDTPHWLVMKGRHSEASKILARLEPQADPNLTIQKIKAGFDKAMDKSSAGLFAFGITVVFAGVSVAAFQQLVGINAVLYYAPQMFQNLGFGADTALLQTISIGVVNFIFTMIASRVVDRFGRKPLLIWGALGMAAMMAVLGCCFWFKVGGVLPLASVLLYIAVFGMSWGPVCWVVLSEMFPSSIKGAAMPIAVTGQWLANILVNFLFKVADGSPALNQTFNHGFSYLVFAALSILGGLIVARFVPETKGRSLDEIEEMWRSQK

SEQ ID NO: 23523 - protein, 526 aa, Candida albicans
MSANIQALMKSYVNFDEHTSGSAARGILIGMFAAFGGFLFGYDTGTISGVLSMDYVKARFPNNKTDFTSGESSLIVSILSVGTFVGSLIAPLFSDRIGRRWTLILSTLIVFNLGVLLQTVATEKKLLIAGRAIAGTGVGLISSVIPNYISETTPKWARGAVTASYQWMITWGLLIAACANKGSQGRKDSGSYRIPIGIQFLWALILGIGFLFLPETPRYWVSKSEETKAKDSLRRIRNLPVDHPDLVSEYDDIKANFDFESKYATSSWTQVFKNVNKQHHRLFTGVAIQALQQLTGINFIFYYGTQFFKRSGIEDPFLIQLATNIVNVGMTVPGIILVETWGRRPLLMAGSVVMAVSQLIVAIVGVAASSHAANQCLVAFSCIFIAGFAATWGPLCWAICGESFALNVRSKSISLCTASNWLWNFGIGYATPYMVDSGKGNADLGSKVFFIWGGCNVIGGLFAYFMVYETKSLTLEQVDELYLKVDHAWQSKGFVPSVHAFRDDGDIEHISSDGKAEMVEVDENSV

SEQ ID NO: 23524 - protein, 545 aa, Candida albicans
MSSKIERIFSGPALKINTYLDKLPKIYNVFFIASISTIAGMMFGFDISSMSAFIGAEHYMRYFNSPGSDIQGFITSSMALGSFFGSIASSFVSEPFGRRLSLLTCAFFWMVGAAIQSSVQNRAQLIIGRIISGIGVGFGSAVAPVYGAELAPRKIRGLIGGMFQFFVTLGIMIMFYLSFGLGHINGVASFRIAWGLQIVPGLCLFLGCFFIPESPRWLAKQGQWEAAEEIVAKIQAHGDRENPDVLIEISEIKDQLLLEESSKQIGYATLFTKKYIQRTFTAIFAQIWQQLTGMNVMMYYIVYIFQMAGYSGNSNLVASSIQYVINTCVTVPALYFIDKVGRRPLLIGGATMMMAFQFGLAGILGQYSIPWPDSGNDSVNIRIPEDNKSASKGAIACCYLFVASFAFTWGVGIWVYCAEIWGDNRVAQRGNAISTSANWILNFAIAMYTPTGFKNISWKTYIIYGVFCFAMATHVYFGFPETKGKRLEEIGQMWEERVPAWRSRSWQPTVPIASDAELARKMEVEHEEDKLMNEDSNSESRENQA

SEQ ID NO: 23525 - protein, 543 aa, Trichoderma harzianum
MAIGNIYVIAGVSVVGGALFGFDISSVSAQLAEQSYLCYFNQDENPPTTADGKCGGPRSLVQGGITASMAAGSWLGALISGPLSDRLGRKYSIMVGCIIWVIGSTLSCASQNIGMLIVARIINGISVGIESAQVPVYIAEISPPSKRGRFIGMQQWAITWGILIMYYISYGCSFIGEDNPVSYNTAAWRIPWGLQMIPAFFLFFMMMPLPESPRWLARKDRWEDCRAVLTLVHGKGDPNHPFVAYELQDIKDMCEFERQHADVTYLDLFKPRMINRTFIGLFTQIWSQLTGMNVMMYYIANIFSMAGYSGNANLLASSIQYIINVLMTIPALLWVDKWGRRPTLLIGSVLMALWMYANAGILATYGEVVPGGIDHVAAQSMRVTGAPAKGLIACTYRFVASFAPTWGPVSWTYPPELFPLRLRGKGVAMATSGNWAFNTALGLFTPVAFANIKWKSYLIFAVFNTVAFFHVFFVFPETAGKTLEETEAMFEDPNGIPYMGTPAWKTKVATSLTVRAEQGDLEAKIAHDTEKPPIHTHEEETTQ

SEQ ID NO: 23526 - protein, 522 aa, Uromyces viciae-fabae
MPAVMAGPVSFAPPEGKSSKVAIVIAVFAAFGGFLYGYDTGYIAGVKAMPFWLRSAGQRGPDGKYMITTSQDSMVTSILSVGTFVGALLAYPIGDRFGRRIGIMIACAIFSVGVALQTASTKIPMFVVGRVFAGLGVGVASCLVPMYQSECAPKWIRGGIVACYQWAITIGLLVASITVNATKDFDSANSYRIPIGIQFIWAAILTIGLLVLPESPRYLLLKGREDEAWKSLSRLYSAPYDDPDVQAEFSEIMASLEKERSFGKTTLLDCFKTDKRKNLQRTLTGLGVQGWQQASGINFFFYYGTTFFKNAGIENAFLVTVATNVVNVVMTIPGIWAVDKVGRRTMMICGAAMMFTCELILACVGTFTATSNLASQKVLVAFSCIFIGLFAATWGPIPWVVTSEIYPLATRGKQMAMSTASNWAVNFFIGFITPYLVDSGAGQAGLGVKVFWLWAALCFGAMVFSFLLIPETKGLSLEQVDLLYTNSTVLKSNTYRSQLIANNLHEGMTPAEKAYQEKLEHI

SEQ ID NO: 23527 - protein, 472 aa, Escherichia coli
  unsure (1)..(472): unsure at all Xaa locations
MVTINTESALTPRSLRDTRRMNMFVSVAAAVAGLLFGLDIGVIAGALPFITDHFVLTSRLQEWVVSSMMLGAAIGALFNGWLSFRLGRKYSLMAGAILFVLGSIGSAFATSVEMLIAARVVLGIAVGIASYTAPLYLSEMASENVRGKMISMYQLMVTLGIVLAFLSDTAFSYSGNWRAMLGVLALPAVLLIILVVFLPNSPRWLAEKGRHIEAEEVLRMLRDTSEKAREELNEIRESLKLKQGGWALFKINRNVRRAVFLGMLLQAMQQFTGMNIIMYYAPRIFKMAGFTTTEQQMIATLVVGLTFMFATFIAVFTVDKAGRKPALKIGFSVMALGTLVLGYCLMQFDNGTASSGLSWLSVGMTMMCIAGYAMSAAPVVWILCSEIQPLKCRDFGITCSTTTNWVSNMIIGATFLTLLDSIGAAGTFWLYTALNIAFVGITFWLIPETXNVTLEHIERKLMAGEKLRNIGV

SEQ ID NO: 23528 - protein, 547 aa, Leishmania donovani
MRASVMLCAALGGFLFGYDTGVINAALFQMKDHFGFSEHSWQYALIVAIAIAGAFVGAFISGFISAAFGRRPCIAVADALFVIGSVLMGAAPNVEVVLVSRVIVGLAIGISSATIPVYLAEVTSPKHRGATIVLNNLFLTGGQFVAAGFTAIMVVFTSKNIGWRVAIGIGALPAVVQAFCLLFFLPESPRWLLSKGHADRAKAVADKFEVDLCEFQEGDELPSVRIDYRPLMARDMRFRVVLSSGLQIIQQFSGINTIMYYSSVILYDAGFRDAIMPVVLSIPLAFMNALFTAVAIFTVDRFGRRRMLLISVFGCLVLLVVIAIIGFFIGTRISYSVGGGLFLALLAVFLALYAPGIGCIPWVIMGEIFPTHLRTSAASVATMANWGANVLVSQVFPILMGAIGVGGTFTIISGLMALGCIFVYFFAVETKGLTLEQIDNMFRKRAGLPPRFHEEGESGESGAGYREDGDLGRLATEDVCDLSSLGNRVVSFAKAEDAFTEVAMPDRHAVSNKFEERATSSSSDPQSLENQDEVRQAAIKAAPHEPK

SEQ ID NO: 23529 - protein, 543 aa, Trypanosoma vivax
MPEYPTEDTNASGKTSGSSPDDHTDDNAPSFFSCENLCIVQVPVSTGSLNGFSIGFVAVYMHLYEIFSGCSALESSGACSGNSKCTWIPNNSTCVWKDCNGAAGATTCKDGSGYNSLESGLFACSMIVGSMIGSIFAGKFLSKFGLKMSFIVSGVLGIVGSALIHVATRGSTLWVMCVGRFLMGLVLGLVCVASPMYVNENAHPKYRKTIGVLFQVFTTFGIMFAALLGLAIVKTPGHDKASGLLWRMQVFCSVSTALSALLLVLGLVVRKSKTSFAGGVDSAGEGVLDPNEYSVRQMLGPLAVGAVTAGTLQLTGINAVMNYAPEIMRNIGMDPMEGNSAVMSWNFVTALVAIPLVSRFTMRQLFLACSFMASCACLIMCGIPVYPGVASVDNRNIVATVGIAVFIAAFEFGVGSCFFVLAQDLFPRSFRPTGSSFVVMAQFIFNIMINLLYPITVEAISGGKGKSPEKGQSVSFIIFGIIGIICFVLQLRYLTPWEDGQGTSTSPTARCNAPTSPNNGEGEPATADMSPVEMSTPKHSGAA

SEQ ID NO: 23530 - protein, 543 aa, Trypanosoma vivax
MPEYPTEDTNASGKTSGSSPDDHTDDNAPSFFSCENLCIVQVPVSTGSLNGFSIGFVAVYMHLYEIFSGCSALESGGACSGNSKCTWIPNNSTCVWKDCNGAAGATTCKDGSDYNSLESGLFACSMIVGSMIGSIFAGKFLSKFGLKMSFIVSGVLGIVGSALIHVATRGSTLWVMCVGRFLMGLVLGLVCVASPMYVNENAHPKYRKTIGVLFQVFTTFGIMFAALLGLAIVKTPGHDKASGLLWRMQVFCSVSTALSALLLVLGLVVRKSKTSFAGGVDSAGEGVLDPNEYSVRQMLGPLAVGAVTAGTLQLTGINAVMNYAPEIMRNIGMDPMEGNSAVMSWNFVTALVAIPLVPRFTMRQLFLACSFMASCACLIMCGIPVYPGVASVDNRNIVATVGIAVFIAAFEFGVGSCFFVLAQDLFPRSFRPTGSSFVVMAQFIFNIMINLLYPITVEAISGGKGKSPEKGQSVSFIIFGIIGIICFVLQLRYLTPWEDGQGTSTSPTARCNAPTSPNNGEGEPATADMSPVEMSTPKHSGAA

SEQ ID NO: 23531 - protein, 568 aa, Toxoplasma gondii
MATEEMREKSLKREAESLWDIPPESYASKACSCMGTAAQLVMVAVLGSFQFGFNLSALNTSKAFIILDFGWCKDENGGHYSDCDTGLVYGSLINTAVFLGACVGCLLGGRLTDFGRRASLIFTHCVCTLGCILSAAAEGFPTLLIARLVVGVAVGMFTVCVPMYLSEVTPDDRRGYFGTFHQLFITLGIFFGTLLGLAFGNAPAGDEVYEVSTFQQAWWRVMLGLPAVVSLLAIWLLWFVFPFETPQYMVEKKQRAKATALLREIYGRDNVDVEIQRIVTSRYQQKIQRAQQLTVWKAIVHPTYRSVILLACLLSIMQQFTGINVLVANSNNLYSSLKLPQDAVTGLTVGFTALNVFLTVITIPLVDRLGRRTLLLFSEAVMFVAMGIAFVANLVDQSNTAVQWVTVACVYVFIVGFAVGYGPVLWIYIHEIFPPEIKQGAASLASALNWVATVAIVLPSDFLLKQGFSVFVGICTVALAIIFVVTFIFVKETKGLSIEESPYFKGKSRALGSPSAFRMELNSSPSVPLTRGEGAAASAEKGMGLTDAAAMNGGRGVSDDLTKGTEVV

SEQ ID NO: 23532 - protein, 500 aa, Plasmodium knowlesi
MKNSNEISSSQSLKNNGSDGFFNTSLMYVLAACLASFLFGYQVSVLNTIKDFIVIEFGWCAGKEVNCDDSTLKSSFLLASVFIGAVVGSGFSGFLVQHGRRFSLLVIYNFFILVSILTSITHHFHTILFSRLLSGFGIGLITVSVPMYISEMTHKDKKGAYGVLHQLFITFGIFIAVLLGMAMGNVPEEVNNPLGTFQQIWWRLMFFFPCIISILGIVLLTFFFKEETPYYLFEKGKVEESKEILKKIYGSDDVDEPLKAIKDAVEQNEAAKKNSISLMRAMKIPSYRYVILLGCILSGLQQFTGINVLVSNSNALYKGFLTNEWITTLSVIMTVVNFLMTFPAIYIVEKLGRKTLLLCGCAGIVCAFLPTAIANLINNTSDVVKKLSISATFVMIVSFAVSYGPVLWIYLHEMFPSEIKDSAASLASLVNWMCAIIVVFPSDIIIKQSPTILFFIFSGMSIVAFLFIFFFIKETKGGEIGTSPYITLEERQKHMGKSVV

SEQ ID NO: 23533 - protein, 502 aa, Plasmodium vivax
MKKSSKEISSSQSLKNGGSDHFFNTSLMYVLAACLASFIFGYQVSVLNTIKNFIVIEFGWCTGNKVECDDSTLKSSFLLASVFIGAVVGSGFSGYLVQHGRRFSLLVIYNFFILVSILTSITHHFHTILFSRLLSGFGIGLITVSVPMYISEMTHKDKKGAYGVLHQLFITFGIFVAVLLGMAMGEAPDAKSVDALGEFQKIWWRLMFFFPCLISILGIVLLTFFYKEETPYYLFENGKIEESKKILKKIYGTDNVDEPLKAIKDAVEQNEAAKKNSISLMRAMQIPSYRNVILLGCILSGLQQFTGINVLVSNSNELYKEFLSNKLITTLSVIMTVVNFLMTFPAIYIVEKLGRKTLLLCGCAGVICAFLPTAIANQIDSTSAFVKNLSIAATFVMIISFAVSYGPVLWIYLHEMFPSEIKDSAASLASLVNWVCAIIVVFPSDIIIKKSPTILFFIFSGMSILSFLFIFFFIKETKGGEIGTSPYITMEERQKHMGKSAV

SEQ ID NO: 23534 - protein, 498 aa, Plasmodium vivax
MKKSSKEISSSQSLKNGGSDHFFYTSFMYVLGRCLASFIFGSQVSVLNTIKNFIVIEFGWCTGNKVECDDSTLKSSFLLASVFIGAVVGSGFSGYLVQHGRRFSLLVIYNFFILVSILTSITHHFHTILFSRLLSGFGIGLITVSVPMYISEMTHKDKKGAYGVLHQLFITFGIFVAVLLGMAMGEAPDAQKAASLEEFQKIWWRLMFFFPCLISILGIVLLTFFYKEETPYYLFENGKIEESKKILKKIYGTDNVDEPLKAIKDAVEQNEAAKISLMRAMQIPSYRNVILLGCILSGLQQFTGINVLVSNSNELYKEFLSNKLITTLSVIMTVVNFLMTFPAIYIVEKLGRKTLLLCGCAGVICAFLPTAIANQIDRSSDFVRNLSIAATFVMIISFAVSYGPVLWIYLHEMFPSEIKDSAASLAFLVNWVCAIIVVFPSDIIIKKVPTICFSSSRHVHFVLPLIFFFIKETKGGEIGTSPYITMEERQKHMGKSAV

SEQ ID NO: 23535 - protein, 505 aa, Schistosoma mansoni
MGSGKKFTKSLSLSVLLACLGSSFTIGYNLGVLNLPGENIKEFLSRTMLGKNASEAENTANLVTPSFLYAQVSTAFVVAGAIGAFSCGAIADCLGRRNGLIVNSLLAIIGGILVGPCVAYSQPALLFVGRVFNGFNFGISMGIAPMYLTEIAPLSLRGGIGSLHQLALTIGILVSYLMTLTYTLNTPTLWPISVAVGSVPALIALILLPYCPESPRFLFIKKGKEAKARKAFQRLNCIDDINETFNEMKREMHEAEKRPKFKFFRLFTQRDLRMPVLIACIIQVFQQLSGINAVITYSSTMLKTAGIPLVYIQFCVVAVPAINVLMTVLSVYLIERAGRRTLLLWPTVLLAFSLLCLTISVNIASSTKDPTTARTAGIISAVLIILYICGFALGLGPIPGVIVAEIFRQEPRAAAYSLSQGVNLLCNLLVLFSYPSINDAIGGYSFLPFLVIVIICWIFFFLYMIETKNRTCDSNARDLATAKVVACQRPSRLTYKNEEPFYSDE

SEQ ID NO: 23536 - protein, 521 aa, Schistosoma mansoni
MGVASNNGITGKLVLTVLITCVGSSFLIGYNLGVLNLPRRNIEIYFNETVVPNTPELDSSFFYTHVSTIFVVAAAIGAFSCGWVADGLGRRNGLILNNVIGIIGGVIVGPCVLVKQPALLYVGRFVIGINSGITIGIASLYLTEVAPRDLRGGIGACHQLAVTVGIAFSYFITFTFLLNTLNLWPLAVALGAVPAAISLVTLPFCPESPRFLYMKKHKEAEARKAFLQLNVKENVDTFIGELREEIEVAKNQPVFKFTQLFTQRDLRMPVLIACLIQVLQQLSGINAVITYSSLMLELAGIPDVYLQYCVFAIGVLNVIVTVVSLPLIERAGRRTLLLWPTVSLALSLLLLTIFVNLADSGPQSTKNAMGIISIILILIYICSFALGLGPVPALIVSEIFRQGPRAAAYSLSQSIQWLSNLIVLCSYPVIQKNIGGYSFLPFLVVVVICWIFFFLFMPETKNRTFDEVARDLAFGNIVVGKRTTALEDRNLTVFTKQGNNEGPASESLLYPRSDNDKGMYA

SEQ ID NO: 23537 - protein, 500 aa, Taenia solium
MVNFHYVFATVVIVFGSSFQFGFQTGVINSPLPLIEKYILSICEDRGSSPSPEFVQAMSSLVVAGFPIGGIFGALFGGSVSNKMGRKLSLFIFNIPMAVGSLLMMACQAAVSFEMIIVGRVLVGFACGAFTGIAPVYLAEIAPVRIRGMSGIMHQLAIVCAILISQILGLKELMGSAKLWPYLLGLTIIPSVVLLFLFWICPDSPRYILLNSQDLESAKSALFWLRGDTEVVEEEIGELLAEQENESENHTKFPLKDLFRVKALRLALFVAVVAHLAQQFSGINAALFYSTSLFESIGLTSQAVYATLGVGSMIVVITVASIFLIERVGRRILLIGGLSVMLFSAVIITIGLALRSHASGLVYLAITFVYIFVGGFAIGPGSIPWFVVAEMFVQETRDPAIVITVIVNWLAQIVISLGYPPLLKYLKDYSFMPFIGLLVIFIALLYFFLPETKGRAPCDVQDEFVRMTGGAEDDVTLGSYTRSLPSENGENMTKSDRVKF

SEQ ID NO: 23538 - protein, 510 aa, Taenia solium
MKGISGPLVLAIFTTCFGSSFLLGYNLGVANLPGDNIKKFLVNYYKPDNSSALNANFLYGQVTSVLVICAAIAAFTCGWVADGLGRKRSLMVNNGIGIVGSVISSVCVVANQPALLYVGRAISGLNSGLSIGIAAMFLTEIAPRHLRGMIGACNQLAITIGIVISYVLTLSHLLNTPTLWPVAMGVGAIPAVIALIISPFTVESPRWLYLKKKDEKAAREAFARINGSENVDMFIAEMREELEVAQNQPEFKFTELFRRRDLRMPVIIAVLIQVMQQLSGINAVVANSSEMLKSAKVSPDMLEYFVVGLGLLNVICTIVALPLLEKAGRRTLLLWPSLVVAIILLLLVIFVNIANYGGVVNKTPFVLVSAVLVFIYVAAFAMGLGPMPALIVAEIFRQGPRAAAYSLSQSIQWACNLIVVASFPSLNELLKGYVYLPYLVVVAVCWVVFFLFMPETKNRTFDEVARDLAFGSIVVGKRTAALQAPVFTKEDEEAATALRRSDEEDAKVDA

SEQ ID NO: 23539 - protein, 492 aa, Caenorhabditis elegans
MGVNDHDVSVPLQEVQSRTVEGKLTKCLAFSAFVITLASFQFGYHIGCVNAPGGLITEWIIGSHKDLFDKELSRENADLAWSVAVSVFAVGGMIGGLSSGWLADKVGRRGALFYNNLLALAAAALMGLAKSVGAYPMVILGRLIIGLNCGFSSALVPMFLTEISPNNLRGMLGSLHQLLVTIAILVSQIFGLPHLLGTGDRWPLIFAFTVVPAVLQLALLMLCPESPKYTMAVRGQRNEAESALKKLRDTEDVSTEIEAMQEEATAAGVQEKPKMGDMFKGALLWPMSIAIMMMLAQQLSGINVAMFYSTVIFRGAGLTGNEPFYATIGMGAVNVIMTLISVWLVDHPKFGRRSLLLAGLTGMFVSTLLLVGALTIQNSGGDKWASYSAIGFVLLFVISFATGPGAIPWFFVSEIFDSSARGNANSIAVMVNWAANLLVGLTFLPINNLMQQYSFFIFSGFLAFFIFYTWKFVPETKGKSIEQIQAEFEKRK

SEQ ID NO: 23540 - protein, 510 aa, Caenorhabditis elegans
MSEKSRSDTSATASLSDSSKSPSSYSTPGTTTQKIIFPDGKLTKCLAFSAFVITLASFQFGYHIGCVNAPGGLITEWIIGSHKDLFDKELSRENADLAWSVAVSVFAVGGMIGGLSSGWLADKVGRRGALFYNNLLALAAAALMGLAKSVGAYPMVILGRLIIGLNCGFSSALVPMFLTEISPNNLRGMLGSLHQLLVTIAILVSQIFGLPHLLGTGDRWPLIFAFTVVPAVLQLALLMLCPESPKYTMAVRGQRNEAESALKKLRDTEDVSTEIEAMQEEATAAGVQEKPKMGDMFKGALLWPMSIAIMMMLAQQLSGINVAMFYSTVIFRGAGLTGNEPFYATIGMGAVNVIMTLISVWLVDHPKFGRRSLLLAGLTGMFVSTLLLVGALTIQNSGGDKWASYSAIGFVLLFVISFATGPGAIPWFFVSEIFDSSARGNANSIAVMVNWAANLLVGLTFLPINNLMQQYSFFIFSGFLAFFIFYTWKFVPETKGKSIEQIQAEFEKRK

SEQ ID NO: 23541 - protein, 466 aa, Nostoc punctiforme
MSSTTVRRKSNTFYVILIAGAAALGGFLFGFDTAVINGAVLSLAKAFNTSSWVTGLAVSLALLGSAVGAFFAGQIADRYGRVKAMVVASVLFTISAIGSGMAFTIWDFIFWRVLGGIGIGVASVIAPAYIAECSPTHLRGRLGSLQQLAIVVGIFVALLSDYFIATSAGSADSPFLFGVAAWRWMFWTAVPPAVFYGMVALTIPESPRYLVAKGRESEAVNVLTKILGGDVLPKIEEIRQTVLRERQPKFSDLLSRSGGLLPIVWIGIGLSVLQQFVGINVIFYYSSVLWRAVGFSEKDSLSITVITGAVNIITTLIAIAFVDKFGRKPLLIIGSIGMTLTLGTMAYIFGNAPLDAAGNPSLAGSAGTVALIAANLYVFCFGFSWGPIVWVLLGEMFNNKIRAAALSVAAAIQWVANFLISTTFPPILQYFGLGSAYGLYTIAAATSFFFILFFIKETKGIELEDM

SEQ ID NO: 23542 - protein, 481 aa, Drosophila melanogaster
MAFLCAPGLTFFLTYSIFSAVLGMLQFGYNTGVINAPEKNIENFMKDVYKDRYGEDISEEFIQQLYSVAVSIFAIGGMLGGFSGGWMANRFGRKGGLLLNNVLGIAGACLMGFTKVSHSYEMLFLGRFIIGVNCGLNTSLVPMYISEIAPLNLRGGLGTVNQLAVTVGLLLSQVLGIEQILGTNEGWPILLGLAICPAILQLILLPVCPESPRYLLITKQWEEEARKALRRLRASGSVEEDIEEMRAEERAQQSESHISTMELICSPTLRPPLIIGIVMQLSQQFSGINAVFYYSTSLFMSSGLTEESAKFATIGIGAIMVVMTLVSIPLMDRTGRRTLHLYGLGGMFIFSIFITISFLIKEMIDWMSYLSVVATLGFVVFFAVGPGSIPWMITAELFSQGPRPSAMAIAVLVNWMANFVVGIGFPSMKTALENYTFLPFSVFLAIFWIFTYKKVPETKNKTFEEILALFRHNNGRYVSLH

SEQ ID NO: 23543 - protein, 505 aa, Plasmodium yoelii yoelii
MNILRMDILSRGGTQEIEHRDGFFNTSFQYVLSACLASFIFGYQVSVLNTIKSYIVVEFEWCSTKTDTSCEDSILKSSFLLASVFIGAVLGSGFSGYLVKFGRRFSLMVIYIFFIFVSILTAISHHFHTILYARLLSGFGIGLITVSVPMYISEMTHKDKKGAYGVLHQLFITFGIFVAVLLGLFLGDGPKINGKSIELSNFEMFWWRFMFFLPTIISLLGIILLIAFYKEETPYFLYENGNIEGSKNILKKIYGPSDVDDALRAIKDAIDQNKAAKESSLSLLSALKIPAYRNVIILGCILSGFQQFTGINVLVANSNELYKEFLDKNLITILSVIMTAVNFLMTFPAIYIIEKIGRKTLLLGGCIGVICAFLPTVIARQVWGPTKIVNGLSIAGTFLMIISFAVSYGPVLWIYLHEMYPSEIKDSAASLASLINWVCAIIVVFPSDIIIKKSPSILFMFFSVMCIIAFLFIMFFIKETKGGEIGTSPYISLEERQKHIGKSKV

SEQ ID NO: 23544 - protein, 553 aa, Halocynthia roretzi
MGKENLVENGSGQYSEKPKATFSLIMGVAMAVIGSSFQYGYNIAVVNAPADEIKDFFFGPYKTVVIINSTTPAYNYTTAMTSLNSTQFPFTEAVIKTETIVVDEDLRVYRDNMYAIAVSAFAASGMVGSILVGPVVKRFGRCGGLMVNNCISLIAAVFLGFSKLANSFIMIIIGRVFIGIFAGLATGIVPMYIGEISPKEWRGAIGVLNQLLITIGILVAQLLGLQGALGTPDLWPILLGFTAIPSIIQIIARPFMPKSPRYLLIDQHKSDEARNTLVKLRGTDNIASEMDEMQNEADSEISVGQMSIAQLFKDHTVRWQLIIVLSIMVAQQLSGINAVFFYTNEIFESAKIPAGNQQDLASVGVGVVNVLMTIVSVGVIEWAGRKSLLVWGFGMMIFWCIAMTVVLNLLQTITVAWISYLSIACVIGYIVGFAIGPGPVPWLVTAELFRQAARPPAFMIACLLNWTCNFLIGIGFPAVNKATGPYVFLIFMVVCIAITVFLSLVMPETKGKTFQEINNLFAKRNGVRESSTNNDKSMRIPLKDFGNEAGDRV

SEQ ID NO: 23545 - protein, 489 aa, Eptatretus stoutii
MDSKEKQLTFRLAFAVTVAALGSLLFGFNIGVMNAPEQIIKDFFNETWMGRSGVEIEKATLLTLWSFTVAIFTVGGMVGSLSVGLFVNRFGRRNPMCLNNLLAVLGGAFMAMSKDASSYETLILGRFVIGLYCGLATGFVPMYLGEISPTNLRGAVGTIHQLAIVFGILISQVLGLNFIFGSENRWPILLGLAIIPAVVQALALPFCPKSPRFLLINQTKEKEAKDVLKQLRGVEDVGTEMLEMKEEHRRMTQEPKVSILQLFRHPNYRQAIIISIVLQLSQQLSGINAVFYYSTGIFSKAGVDQAEYATIGAGVVNAAFTIVSLFLVERLGRRLLHLVGLGGMAVCTVIMTLSLHFMTKAPAVSYLAIIAFFGFVAFFEIGPGPIPWFIVAELFSQGPRPAAVAVAGCSNWTSNFLVAMLFPFAQELMGPFVFLIFTVLLIFFTIFTYFRVPETKGRTFDDIASEFRVKAGMKPEAAENIQLNTDSSV

SEQ ID NO: 23546 - protein, 533 aa, Ctenopharyngodon idella
MEKMKDSKMKQVTHYLVFCVSTAVIGSLQFGFNTGVINAPDKKVQNFIRNVTLERTGETMKDTTLTNVWGIAVSIFNVGGMVGSLSVGALVDKLGRRKSMLLSNILALIGGSLMGLSKVSASYELMIVGRLVIGVFCGLCTGLTPMYVGEISPTALRGAFGTLHQLGVVIGILVAQILGLESLLGSQSLWPLLLALTILPAVLQSVMLIFCPESPRYLLISVNQEDEARKVLTRLRGHSDVEDDIREMKEEAMKMSMEKKVSIPELFRNSAYRQPIIIAIILQLSQQLSGINAVIYYSTEIFRKAGITEPVIATIGMGAVNTLFTVVSLFLVERAGRRTLHMIGLAGMTFCVLVMTISLKLVNPADPVQNSTVIAKTASEAGISAVSVVAILAVLGFVASFEMGPGPIPWFIVAELFAQGPRPAAIAVAGCCNWTASFIVGLSFPPLLELCGPYVFIIFLILLIIFFLFTYFRVPETKGRTFEDIASGFSNVAGSNAANYTSPEGAVTMPVSPSSDKIQMTELAGQEKSGTNL

SEQ ID NO: 23547 - protein, 478 aa, Cyprinus carpio
MLAVGTAVIGSLQFGYNTGVINAPQNVIEKFYNETWLDRYQEIIPKTTMTTLWSLSVAIFSVGGIVGSFSVGLFVNRFGRRNSMLMANVLAFISAALMGFSKNAASWEMLIIGRFVVGLYSGLATGFVPMYVGEVSPTALRGALGTLHQLGIVVGILMAQIFGMDVIMGNDTMWPFLLCFTFIPAVLQCCLLPFCPESPRFLLIIRNEENKAKSVLKKLRGTSDVAADMQEMKEESRQMMREKKVTIPELFRSPLYRQPMIICIMLQLSQQLSGINAVFYYSTKIFQKPGVEQPVYATIGAGVVNTAFTVVSLFVVERAGRRSLHFLGLLGMAGSAVLMTIALALLENVPWMSYISIVAIFGFVAFFEIGPGPIPWFIVAELFSQGPRLRLSVAGLCNWTANFIVGMCFQYVEELCGPYVFIIFTIFLLGFFVFTYFKVPETKGRTFDEISAGFRQAASAAEKHSPEELNSLGADSQL

SEQ ID NO: 23548 - protein, 505 aa, Oncorhynchus kisutch
MPSGFQQLGGETVTGTLALSVFTAVLGSFQFGYNIGVINAPQKIIEADYNATWVHRYGEPIPSSTLTTLWSLSVAIFSIGGMISSFCVGVISEWLGRRKAMLINNLFAFIGGGLMGMAKISRSFEMMILGRFVIGAYCGLASGLVPMYVGEIAPTSLRGALGTLHQLAIVTGILMAQVLGLESLLGSEELWPVLVGVTVLPTVLQMVLLPFCPESPRFLYIIRSQEHHAKSGLRRLTGRQEVGDMLAEMKEEKRRMDMERKVSIAELFRSPMYRQPIIIAILLQLSQQLSGVNAIFYYSTSIFQKAGVQSPVYATIGAGVVNCAFTVVSLFLVERTGRRTLHMLGLSGMCGCAIVMTMALALLDSVPWMSYISMLAIFGFVAFFEVGPGPIPWFFVAELFSQGPRPAAMAVAGFANWTANFIIGFGFQYVAELCGPYVFLIFAALLLFFLIFTFFRVPETRGKTFDQISNTFSKHSPAMIDMDLDMELGKHSTELDYLGEEGSLN

SEQ ID NO: 23549 - protein, 492 aa, Oncorhynchus mykiss
MDSGGKQVTFQLMLTVGAAVIGSLQFGYNTGVINAPQKVIERFLNETWFDRYQEPISKTSLTTLWSVSVAIFSVGGIFGSFSVGLFVNRFGRRNSMLMANVLAFVSAALMGFSKMGGSWEMLIIGRFVVGLYSGLSTGFVPMYVGEVAPTALRGALGTLHQLGIVTGILMAQVFGMEALMGNASLWPFLLGFTFIPALAQCALLPFCPESPGFLLINRNEENKAKTVLKKLRGTTDVSADMQEMKEEARQMMREKKVTILELFRSPLYRQPIFIAIMLQLSQQLSGINAVFYYSTRIFEKAGVAQPVYATIGAGVVNTAFTVVSLFVVERAGRRSLHLLGLIGMAGAAVLMTIALALLDKLPWMSYVSIVAIFAFVAFFEIGPGPIPWFIVAELFSQGPPPSAFAVAGFSNWTANFIVGMAFQYVEELCGPYVFVIFTILLLSFFIFTYFKVPETKGRTFDEISAGFRQSSGTGGEKHSPEELNSLGADSQL

SEQ ID NO: 23550 - protein, 482 aa, Oncorhynchus mykiss
  unsure (1)..(482): unsure at all Xaa locations
MESGKQLTGTLTLAVFSAVLGSLQYGYSLGVINAPQKVIEQHYGRSLGVLPEEPLLLSENGTGTEKQEVHPSVVMYWSLSVSIFSIGGVVSSFLVGFVGDLRGRVKGMLMVNVLAVIAGLLMVMAKMWKPHVMVIAGRCVMGFYCGLSSGLVPMYIGEIAPMAYRGALGTLHQLATVTGILLSQVLGLEFLLGNDYYWPLLLGLSGAPAVLQSLLLPLCPESPRXLYIKRGMXEEAKNSLRRLKGEYDPSADLEEMRREKEEVEKEAQVSIAVLVRSSLYRQQLFVALMMHLSQQLSGINAIFYYSTAIFERAGVTQPVYATIGVGVLNTVFTMVSVALVDRAGRRTLTLIGLGGMCICAIAMTVGLVYLRVYSWMSYVSMSAIFLFVCFFEIGPGPIPWFIVAELFSQGPQAAAIALAGCTNWTSNFIIGMTFPYIEALCGSYVFILFAVLLFGFTVFTYLRVPETKGKTFEEIAAVFKRE

SEQ ID NO: 23551 - protein, 503 aa, Salmo trutta
MPPGFQHLGGETVTGTLALSVFTAVLGSFQFGYNIGVINAPQKIIEADYNATWVHRYGELIPTATLTTPWSLSVAIFSIGGMISSFCVGVISEWLGRRKAMLINNLFAFIGGSLMGMAKISRSFEMMILGRFVIGAYCGLASGLVPMYVGEIAPTSLRGALGTLHQLAIVTGILIAQVLGLESLLGSEELWPVLVGVTVLPTVLQMALLPFCPESPRFLYIIRCQEHHAKSGLRRLTGRQEVGDMLAEMKEEKRRMDMERKVSIAELFRSPMYRQPIIIAILLQLSQQLSGVNAVFYYSTSIFQKAGVQSPVYATIGAGVVNSAFTVVSLFLVERTGRRTLHMLGLFGMCGCAIVMTIALALLDSVPWMSYISMLAIFGFVAFFEVGPGPIPWFFVAELFSQGPRPAAMAVAGFSNWTANFIIGFGFQYLAELCGPYVFLIFAVLLLFFLIFTFFRVPETRGKTFDQISTSFSQHPPAMMDLDMELGKRSTELDYLGGEGSLD

SEQ ID NO: 23552 - protein, 162 aa, Capsella rubella
AAPVYLSEVAPPRWRGAFNSGFQFFIGVGVVAANLINYGTDSHRNGWRISLGLAAVPAAIMTVGCLFISDTPSSLLARGKHENAHASLLKLRGVENIADVETELAALARSSQLAIEARAEPFAKTILERRYRPHLVVAVAIPCFQQLTGITVNAFYAPVLFR

SEQ ID NO: 23553 - protein, 500 aa, Mycobacterium tuberculosis CDC1551
MTTLWQPHRNDYSPIPGRGVHARRGARRPRPRGGRAERPGTGQLTRSGRRALLVGLTAASVGVLYGYDLSAIAGALLSLSEEFELTTREQELLTTTAVLGQIAGALGGGILANAIGRKKSVVLIVAGYAVFALLGATSVSVPMLVVARLLLGVTIGLSVVVVPVYVAESAPAAVRGSLVTAYQLATLSGIVVGYLVGYLLAGSHGWRAMFGLAAAPATLLLPLLWRMPIPPAGICSRAGSPTRVAAADPAGRDIDAELADMAAAVDERGGGIGEMVRRPYLRATLFVIALGFLVQITGINAIIYYSPRLFAAMGFAGYFAMLALPAMVQVAGLAAVCASLFLVDRLGRRPILLSGIATMITADAVLITVFANDSDGGTGLVLGFAGVLLFIIGFNFGFGSLVWVYAAESFPSRLRSMGSSLMLTSTLTANAIVAAFSLTMLRVLGGAGVFAVFGTFAVVAFVVVYRFAPETKGRKLEEIRHFWENGGRWPAERSPAADEP

SEQ ID NO: 23554 - protein, 493 aa, Xenopus laevis
MESRKGQVTCSLVFSVCVAAIGSLQFGYNTGVINAPEKIIRSFYNATYEHRYGKIIPESLLTSLWSLSVAIFSVGGMMGSLSVGLFANRFGRRNSMLLVNVAAIVGGAFMGFSKLAWSPEMLIIGRFIIGIFCGLCTGLVPMYIGELAPTSLRGALGTLNQLGIVIGILVAQIFGLDFILGSETLWPLLLAFTIFLSIIQCALLPFCPESPRYLLITKGEDEKAEMILRKLRGTTDVASDVQEMKDESARMAQEKSVSIIEIFRSSQYRQPITIAIILQLSQQLSGINAVFYYSTSIFEDANVPNPVYATIGAGVVNTVFTIVSLLIVERAGRRTLHLTGLGGMAVGALIMTIALKLKDQDQAWSYVSIVAIYGFVALFEIGPGPIPWFIVAELFSQGPRPAAMAISGCSNWTANFLVGMLFPYAAIACGPYVFLIFMVLLILFFIYTFFKVPETRGRTFEDISQEFQKKGAESRTKSDSVELTGIQGLDKKV

SEQ ID NO: 23555 - protein, 621 aa, Macaca fascicularis
MVPVENTEGPNLLNQKGTAVETEGSYRASGSRHPPWARGCGMFTFLSSVTAAVSGLLVGYELGIISGALLQIKTLLTLSCHEQEMVVSSLLIGALLASLTGGVLIDRYGRRTAIILSSCLLGLGSLVLILSLSYTVLIVGRIAIGVSISLSSIATCVYIAEIAPQHRRGLLVSLNELMIVIGILSAYISNYAFANVFHGWKYMFGLVIPLGILQAIAMYFLPPSPRFLVMKGQEGAASKVLGRLRALSDATEELTVIKSSLKDEYQYSFWDLFRSKDNMRTRIMIGLTLVFFVQITGQPNILFYASTVLKSVGFQSNEAASLASTGVGVVKVISTIPATLLVDHVGSKTFLCIGSSVMAASLVTMGIVNLNIHMNFTNICRSHNSINQSLDESVIYGPGNLSASNNTLRDHFKGIASHSRSSLMPLRNDVDKRGETTSASLLNAVLSHTEYQIVTDPGDVPAFLKWLSLASLLVYVAAFSIGLGPMPWLVLSEIFPGGIRGRAMALTSSMNWGINLLISLTFLTVTDLIGLPWVCFIYTIMSLASLLFVVMFIPETKGCSLEQISMELAKVNYVKNNICFMSHHQEELVPRQPQKRKPQEQLLECNKLCGRGQSRQLSPEN

SEQ ID NO: 23556 - protein, 495 aa, Canis familiaris
MGTQKVTVSLIFALSIATIGSFQFGYNTGVINAPETIIKDFLNYTLEEKSENLPTEVLLTSLWSLSVAIFSVGGMIGSFSVGLFVNRFGRRNSMLMVNLLAVAGGCLMGFCKIAQSVEMLILGRLIIGLFCGLCTGFVPMYIGEISPTALRGAFGTLNQLGIVIGILVAQIFGLKVIMGTEELWPLLLGFTIIPAVLQSAALPFCPESPRFLLINRKEEENAKEILQRLWGTQDVSQDIQEMKDESARMAQEKQVTVLELFRSRSYRQPIIISIMLQLSQQLSGINAVFYYSTGIFKDAGVEEPIYATIGAGVVNTIFTVVSLFLVERAGRRTLHMIGLGGMAVCSILMTISLLLKDNYNWMSFVCIGAILVFVAFFEIGPGPIPWFIVAELFSQGPRPAAMAVAGCSNWTSNFLVGLLFPSAAFYLGAYVFIIFTGFLIVFLVFTFFKVPETRGRTFEEITRAFEGQGQDANRAEKGPIVEMNSMQPVKETATV

SEQ ID NO: 23557 - protein, 395 aa, Ferroplasma acidarmanus
MKVSQYYTKKLSKFWGNRSLLLSRTLIGLAVGADSAIATAYIAEYAPKNRRGHLSLMQQWMITWGILGAYFVGMGVFFIAPQLAYTIDWRVLLGVAAIPSLIGLVFRFYMPESPRWLILHEKYDKAIASLKRFNVTAKLSEIKNTHDYLVAKETKQKATPGIKRAFVIVGLFMMFQQITGINIPFYYGPVVIAKLHIFGSTGGTAISSAVFGIEASSILAIINVLATLIGFRLIDSYGRRSLALLGYSGMAFFDVLGAVLYLSHIDIGLLIGFAGFIIFFAFGVGGTGWIIQGEYFPTQYRGLFASLIAVVDWISNFAIIELFPVMDLKIGLGYTMAVFAVLSIMAVVIFFYIMPKTKGKSVEEINDIFENNTLATVRNASMSGYSDNSKTDKKQ

SEQ ID NO: 23558 - protein, 509 aa, Equus caballus
  unsure (1)..(509): unsure at all Xaa locations
MPSGFQQIGSEDGEPPQQRVTGTLVLAVFSAVLGSLQFGYNIGVINAPQKVIEQSYNETWLGRQGPEGPSSIPPGTLTTLWALSVAIFSVGGMISSFLIGIISQWLGRKRAMLVNNALAVLGGSLMGLADTAASYEMLILGRFLIGAYSGLTSGLVPMYVGEIAPTHLRGALGTLNQLAIVIGILIAQVLGLESMLGTATLWPLLLGITVLPALLQLVLLPFCPESPRYLYISRNLEGPARKSLKRLTGWADVSGVLAELKEEKRKLERERPLSLLQLLGSRVHRQPLVIAVVLQLSQQLSGINAVFYYSTSIFEKAGVGQPAYATIGAGVVNTVFTLVSVFLVERAGRRTLHLLGLAGMCGCAILMTVALLLLERVPAMSYVSIVAIFGFVAFFEIGPGPIPWFIVAELFSQGPRPAAMAVAGFSNWTCNFIIGMGFQYVADAMGPYVFLLFAVLLLGFFIFTFLRVPETRGRTFDQISAAFHRTPSLLEQEVKPSTELEYLGPDEXD

SEQ ID NO: 23559 - protein, 451 aa, Sus scrofa
EFYNQTWLHRYGESISPATLTTLWSLSVAIFSVGGMIGSFSVGLFVNRFGRRNSMLMMNLLAFISAVLMGFSKLGKSFEMLILGRFIIGVYCGLTTGFVPMYVGEVSPTALRGALGTLHQLGIVVGILIAQVFGLDSIMGNEELWPLLLSVIFIPALLQCVLLPFCPESPRFLLINRNEENRAKSVLKKLRGTADVTRDLQEMKEESRQMMREKKVTILELFRSAAYRQPILIAVVLQLSQQLSGINAVFYYSTSIFEKAGVQQPVYATIGSGIVNTAFTVVSLFVVERAGRRTLHLIGLAGMAGCAVLMTIALALLEQLPWMSYLSIVAIFGFVAFFEVGPGPIPWFIVAELFSQGPRPAAIAVAGFSNWTSNFIVGMCFQYVEQLCGPYVFIIFTVLLVLFFIFTYFKVPETKGRTFDEIASGFRQGGASQSDKTPEELFHPLGADSQV

SEQ ID NO: 23560 - protein, 494 aa, Bos taurus
MGTTKVTAPLIFAISVATIGSFQFGYNTGVINAPEAIIKDFLNYTLEERSEPPPSSVLLTSLWSLSVAIFSVGGMIGSFSVGLFVNRFGRGNSMLIVNLLAIAGGCLMGFCKIAESVEMLILGRLIIGLFCGLCTGFVPMYIGEISPTALRGAFGTLNQLGIVIGILVAQIFGLKVILGTEDLWPLLLGFTILPAIIQCAALPFCPESPRFLLINRKEEEKAKEILQRLWGTEDVAQDIQEMKDESMRMSQEKQVTVLELFRAPNYRQPIIISIMLQLSQQLSGINAVFYYSTGIFKDAGVQEPVYATIGAGVVNTIFTVVSVFLVERAGRRTLHLIGLGGMAFCSILMTISLLLKDNYSWMSFICIGAILVFVAFFEIGPGPIPWFIVAELFGQGPRPAAMAVAGCSNWTSNFLVGLLFPSAAFYLGAYVFIVFTVFLVIFWVFTFFKVPETRGRTFEEITRAFEGQTQTGTRGEKGPIMEMNSIQPTKDTNA

SEQ ID NO: 23561 - protein, 472 aa, Salmonella typhimurium LT2
MVSINHDSALTPRSLRDTRRMNMFVSVSAAVAGLLFGLDIGVIAGALPFITDHFVLTSRLQEWVVSSMMLGAAIGALFNGWLSFRLGRKYSLMAGAILFVLGSLGSAFASSVEVLIGARVILGVAVGIASYTAPLYLSEMASENVRGKMISMYQLMVTLGIVLAFLSDTAFSYSGNWRAMLGVLALPAVLLIILVVFLPNSPRWLAQKGRHIEAEEVLRMLRDTSEKARDELNEIRESLKLKQGGWALFKANRNVRRAVFLGMLLQAMQQFTGMNIIMYYAPRIFKMAGFTTTEQQMIATLVVGLTFMFATFIAVFTVDKAGRKPALKIGFSVMALGTLVLGYCLMQFDNGTASSGLSWLSVGMTMMCIAGYAMSAAPVVWILCSEIQPLKCRDFGITCSTTTNWVSNMIIGATFLTLLDSIGAAGTFWLYTALNIAFIGITFWLIPETKNVTLEHIERKLMAGEKLRNIGV

SEQ ID NO: 23562 - protein, 501 aa, Ovis aries
MEPQDPVKREGRLTPVIVLATLIAAFGSSFQYGYNVATINSPSEFMKDFYNYTYYDRVGEYMNEFYLTLLWSVTVSMFPFGGFLGSLMVGPLVNNLGRKGTLLFNNIFSIVPALLMGFSDLAKSFEMIIVARVLVGICAGLSSNVVPMYLGELAPKNWRGALGVVPQLFITIGILVAQIFGLRSLLANEEGWPILLGLTGIPAVLQLLFLPFFPESPRYLLIQKKDEEAAKRALRRLRGWHDVDAEIEEILEEDRAEKAAGFISVLKLFKMRSLRWQVISIIVLMAGQQLSGVNAIYYYADQIYLSAGVKEDDVQYVTAGTGAVNVLITVCAIFVVELMGRRFLLLLGFSVCFTACCVLTGALAMQDVISWMPYVSIACVISYVIGHALGPSPIPALLVTEIFLQSSRPAAYMVAGTVHWLSNFTVGLVFPFIQVGLGAYSFVIFAVICFLTTVYIFLIIPETKSKTFIEINQIFIKMNKVPGVHPEKEELKEFPPSTARQ

SEQ ID NO: 23563 - protein, 743 aa, Hordeum vulgare subsp. vulgare
  unsure (1)..(743): unsure at all Xaa locations
MSSGAVLVAIAASIGNLLQGWDNATIAGAVLYIKKEFSLETQPLIEGLIVAMSLIGATVITTFSGAVADAVGRRPLLIASSVLYFVSGLVMLWAPNVYVLLLARLIDGFGIGLAVTLVPLYISETAPTDIRGLLNTLPQFSGSGGMFLSYCMVFTMSLMPQPDWRIMLGVLSIPSLMYFALTVFYLPESPRWLVSKGRMAEAKRVLQRLRGREDVSGEMALLVEGLGVGKDTHFEEYIIGPDDELADDGLAPDQEKLKLYGAEEGVSWIARPVRXGGQSALGSALGLMSRHGSMVSQGKSLVDPLVTLFGSVHEKMPEVMGSMRSTLFPNFGSMFSVAEQQQAKADWDAESHRDDEDYASDHGADDIEDNLNSPLISRQATSVEGKEIAAPHGSIMGGVESSSMQGGDAVSSMGIGGGWQLAWKWTEREGADGQKEGGFQRIYLHEEGVSGDRRGSILSMPGGDIPPGGEYIQAAALVSQPALYSKDLIEQQLAGPAMVHPSEAVAKGTKWAELFEPGVKHALFVGIGLQILQQFAGINGVLYYTPQILEQAGVGILLSNIGLSSSSASILISALTTLLMLPSIGIAMRLMDMSGRRFLLLSTIPVLIVALAILVLVNVLDVGTMVHAALSTISVIVYFCFFVMGFGPIPNILCAEIFPTSVRGICIAICALTFWIGDIIVTYTLPVMLNAIGLAGVFGIYAVVCMIAFVFVYMKVPETKGMPLEVITEFFSVGAKQGKEATD

SEQ ID NO: 23564 - protein, 471 aa, Burkholderia fungorum
MYMEKEIAGTAGVQASVSARLDRLPPTRYFSGLVARIAIGGWFEFYEMFMAAYISLGLISSGLYRATTAGLFDVDGFASFLGSFFAGMFVGTVALGGFTDRFGRRAVFTCAMLIYSVATFAAAFQHSPQAMDLWRFVAGLGIGVQLITVDTYISELTPHHTRGRYSAFSILVILTSVPTVAVLSFLLVPHTILGLEGWRWVMIIGSAGAVLIWFMRRGLPESPRWLESKGRLDEARAIVDAIEARVVAETGRALQAPAQRAPQPLTGEHGGSWSEMWKGRYLSRTIMLSFFNFFQTFGVYGFGAWVPVLLYTKGITITHSLLYTMVIAFATPLGALGAMACAERIQRKWQLVGCAIVVAVAGVLFGMVREPLLILLFGSAVTIANNWLIGIFHTYQAELYPTRIRARAVGFVFSWSRLSSIFVGFWVAALLKHSGVPAVFVLISSAMFVIVVMVGLLGPKTNGIRLEELSQ

SEQ ID NO: 23565 - protein, 212 aa, Corynebacterium ammoniagenes
GWIRITVLLAMLMGLTQQITGVNAVVYFAPTMMNQVGISATNSVYTSIVIGVVSVIACMVGIKVVDRIGRKRLLLIGLAGNTISLFILAGAYSFANGSVFFAMVSLFFMATFIASQQAAVSPATWLLISELVPSQVRGLGMGIAGLSLWVTNWAVAQYFLPLVEWLTGPVAFAIFGVLGIIAMGYTRALVPETMGKSLDEVGAEMHNRYAHK

SEQ ID NO: 23566 - protein, 493 aa, Anopheles gambiae str. PEST
QARDAMSKFVVNNVAGESGRKLPQYIAGLAASGGALAAGTFLGWTAPTDKPLTVEGEYGFPVSDEQFSWVGSISNLGAALMCFPIGYMMKLIGRKWSMLAMVLPLVLGWLLIIFAENVAMLMVGRFFLGVGGGAFCVAAPTYTAEIAQPSIRGTLGTFFQLMVTVGILFVYAVGAGVDVQVLSIICGVIPLVFGAIFFFMPESPYYFVEKGRYSEAASSLKWLRGAQYDENAEIEDLKQADEKVKAEAIPMLVAFRQKATVRALAISLGLMFFQQLSGINAVIFYNSAIFASANGGKEMSSASIIVGGIQVVATLLASVVVDKVGRRILLLVSDLMMAVSTILLAVYFQLKQDDPAKVDDLSWLAVLAVCLFIAMFSIGYGPVPWLMVGELFANNVKAFASPVAGVFNWLLAFLVTKVFTNLKDAMGEAGVFWLFSGISLLGTVFVFLVVPETKGKSLNNIQRLLAGEKLNADEPAGLPEPRDERDERPAQVA

SEQ ID NO: 23567 - protein, 497 aa, Anopheles gambiae str. PEST
RVSNGSKMVKILMRADTHVSFSVPIEEPVAKCTFSQVLAALSVSLGSMVVGFSSAYTSPALVSMKDRNITSFEVTDQSGSWVGGIMPLAGLAGGILGGPMIEYLGRKNTILATATPFIISWLLIGCATHVAMVLVGRALSGLCVGIASLSLPVYLGETVQPEVRGTLGLLPTAFGNIGILLCFVAGKYLDWSGLAFLGAALPIPFLLLMFLIPETPRWYVSRNREDRARKALQWLRGRKADVEPELKGISKSHQDAERHASSSAMLDLLNKANLKPLLISLGLMFFQQLSGINAVIFYTVQIFQSAGSTIDEKLCTIIVGVVNFIATFIATVLIDRLGRKILLYISDVAMIITLMTLGTFFYMKNNGDDVSEIGWLPLAAFVVFVVGFSLGFGPIPWLMMGEILPGKIRGSAASVATAFNWSCTFVVTKTFADITASIGNHGAFWMFGSICIVGLLFVIVYVPETQGKSLEDIERKMMGRVRRMSSVANIKPLSFNM

SEQ ID NO: 23568 - protein, 483 aa, Anopheles gambiae str. PEST
AVKMSSSAPGATNPMLYDPIPEGQGSTTKRNQFVAALGICMAAVSGGTALAWTSPVLAQLVPANQSDTSGLEHESFLLTTDEGSWVGAFLAVGAFLGALPAGYLAEKIGRKYTTMSLAVPYLISWALIIFATGAGMLYAGRLVIGIATGASCVVAPMFISEVAETSIRGALGAFFQLHLTVGILFVYAVGSYTHWVTLSILCAIFPVLLIVAMFIVPESPVYLVKKGRRIDAGVALKWFWGPNADTQSALQTIQSDLDAASGEAKVSDLFTNPTNRAALFISLLLMFFQQFSGINAVIFYTAPIFQSAGSTMDPAVCSIVVGVVQVVMTLASSVLIDKAGRRILLLQSSFIMGACLIVLGVYFKMQNDKVDVSNIGWLPLASVVLFIISFSLGFGPIPWMMMGELCAPDIKGLASALAVMFNWTLVFLVTKSFGTMQELLGSDWTFWFFGAWMMVCTVYVFIKVPETKGKTNAQIQAILGGKK

SEQ ID NO: 23569 - protein, 508 aa, Corynebacterium glutamicum ATCC 13032
MTDIKATSSTSATTAPTAGRPARRLGQISLVACLGGLLFGYDTGVANGAEGHMAQELGLNVLQLGVVISSLVFAAAFGALFAGRISDEIGRRKAIITLSVLFFLGSILVVFSPAGELGQFYGPGFATLVTGRIMLGLAVGGASTVVPVYLAELAPLEIRGSLTGRNELAIVTGQLLAFVINALIAVTLHGVIDGIWRIMFAVCALPAVALFLGMLRMPESPRWLVNQGRYDDARRVMETVRTPERAKAEMDEIIAVHSENNAALPGVKQSSGQASGQVSSKHTHMSIGEVLSNKWLVRLLIAGIGVAVAQQLTGINAIMYYGTRVLEESGMSAEMAVVANIAFGAVAVIGGLIALRNMDRLDRRTTFIIGLSLTTTFHLLIAAAGTLLPEGNSIRPFAIMILVVGFVLSMQTFLNVAVWVWLAEIFPVRMKGIGTGISVFCGWGINGVLALFFPALVSGVGITFSFLIFAVVGVIALAFVTKFVPETRGRSLEELDHAAFTGQIFKKA

SEQ ID NO: 23570 - protein, 459 aa, Thermoplasma acidophilum
MISSMTESWEELKERAYGPMDKQKSKWFNYKMLLLTGGGIFVDGYNIVIISFGLAGIETLFGLQHNAFLVGLIGISVIIGNLVGALLSGYFVDKVGRRTIFIIDLILFVFFAIISGLVTNAYELVVARLLVGLGIGLDYPIATSYLSEYTPINPRGKFLVMNITFFNIAGVVAAIVGYSLLPLGATIAWRYMLMSAAVPAAITIAGRIRTPESPRWLLEHGRKKEAIQAIERVTESTLPDDTQKFIMDSNVKPPVSGYYKELLTKYTKSAIFIGLFYFFFAIAFVNASLYGPSILASFGEAGLIGSSLYWLLFVVGDIICILVIDSFGRRNSTLTGWAGMLITMIILAFAPSNLKLLSLGAFILFAMFQGIGPGSLHMVYSPELFPTRIRATAEGWKQGIGRLGGVLTGLFFPSLVIGDKLLILILTSIAGLVLSILMAPETKRKGLEEISEKDINLQI

SEQ ID NO: 23571 - protein, 474 aa, Thermoplasma acidophilum
MESNAYAKPVKVPGRSIITSLSAMGYFLDGYDLSVISVFTLVLVTYHIFRYTAFTESFVTGSALLGAFVGAVLFGHYADRIGRRYLYIFDLIFFAVFAVLTALATNIYEMIAFRFFVGLGVGADYSLSPVYTTEMYPNAKRGGGYGWVWTFWSLGAAAAFIIGYGFYLIDPLTGWRWTLGLGAIPAIVVVVMRMRMPESIRWKAADKNVSEQEIRDVADSIGIKKEEMDSIMAERNRESRIRSGSLSSLFKGEYGKRTLIVWIQWILYDIAGYGIGLYSPLILKELGVSGSYTLLYSFMFYMPIGFMGAFGAVMLNDRVGRRPLQILGFGSMALAILLFFFAASGKGQVFLAIGILAFIIDYALGNLGPGNTMGLYAIELLPTKLRSSSMGSATGITRIVSFLSAFLFPYLSKPTVLGKEGFFFVLFVVMILALIFTIFFTPETKGLSLEEITVAKYRHEGWKPVLALDDTSKK

SEQ ID NO: 23572 - protein, 567 aa, Kluyveromyces lactis
MSNQMTDSTSAGSGTEHSVDTNTALKAGSPNDLKVSHEEDLNDLEKTAEETLQQKPAKEYIFVSLCCVMVAFGGFVFGWDTGTISGFVNQTDFLRRFGQEKADGSHYLSNVRTGLIVSIFNIGCAVGGIVLSNIGDRWGRRIGLITVIIIYVIGIIIQIASVDKWYQYFIGRIISGLGVGGITVLSPMLISETAPKHLRGTLVSCYQLMITFGIFLGYCTNYGTKNYSNSVQWRVPLGLCFAWAIFMVLGMMFVPESARFLVETDQIEEARKSLAKTNKVSIDDPVVKYELLKIQSSIELEKAAGNASWGELITGKPSMFRRTLMGIMIQSLQQLTGDNYFFYYGTTIFQSVGMDDSFETSIVLGIVNFASTFFALYTVDHFGRRNCLLYGCVGMVACYVVYASVGVTRLWPDGPDHPDISSKGAGNCMIVFACFYIFCFATTWAPIAYVVISESYPLRVKGKAMAIASASNWIWGFLIGFFTPFITSAIHFYYGYVFMGCMVFAFFYVYFFVPETKGLTLEEVNEMYSEGVLPWKSSSWVPSSRRGAEYDVDALQHDDKPWYKAML

SEQ ID NO: 23573 - protein, 551 aa, Kluyveromyces lactis
MSLKNWLLLRDIQYEGTFYKKFPHVYNIYVIGFIACISGLMFGFDIASMSSMIGTDVYKDYFSNPDSLTYGGITASMAGGSFLGSLISPNFSDAFGRKVSLHICAALWIIGAILQCAAQDQAMLIVGRVISGMGIGFGSSAAPVYCSEISPPKIRGTISGLFQFSVTVGIMVLFYIGYGCHFIDGAAAFRITWGLQMVPGLILMVGVFFIPESPRWLANHDRWEETSLIVANIVANGDVNNEQVRFQLEEIKEQVIIDSAAKNFGYKDLFRKKTLPKTIVGVSAQMWQQLCGMNVMMYYIVYIFNMAGYTGNTNLVASSIQYVLNVVMTIPALFLIDKFGRRPVLIIGGIFMFTWLFSVAGILATYSVPAPGGVNGDDTVTIQIPSENTSAANGVIASSYLFVCFFAPTWGIGIWIYCSEIFNNMERAKGSALSAATNWAFNFALAMFVPSAFKNISWKTYIIFGVFSVALTIQTFFMFPETKGKTLEEIDQMWVDNIPAWRTANYIPQLPIVKDEEGNKLGLLGNPQHLEDVHSNEKGLLDRSDSASNSN

SEQ ID NO: 23574 - protein, 716 aa, Kluyveromyces lactis
MESEIFLAPPAKQSKKISILVGMFVAVGGFLFGYDTGLINNISEMPYVNQKFAPNKNHFTTPQISILVSFLSLGTFIGALLAPLISDSYGRKTTMIFSTFVVFMIGNSLQVAAGSMTILVVGRVLSGMSVGLISAAVPLYQSEAAQKSVRGAIISCYQWAITWGLLVASAVSQGTYKRMDASSYQIPIGLQYIWSFLLGVGILFLPESPRYYVFKDRLDKAAKSLSFLRGVPEDDSGLLEELVEIKATYDYEMSFGKISYLDCFRSTRSRTKQRLRMLTGIALQAFQQVSGINFIFYYGVDFFNKSGVSESYLVSFVTYAVNVAFNIPGLFLVEYIGRRKLLLMGGILMTISNFIIAIVGLATDSMVANKVMIAFICLFIASFSATWGGGVWVISAELYPLGVRAKCTAICAASNWLINFICALITPYIMHIDSSVRQTSIGTKIFFVWGSLNAVGVLVVYFTVYETNGLSLEEIDELYKKSSSGINSIEWNKKIKAFPDLFQRTRPNNEGDGEADDNIHTDENYNHTISSYNGTQNNEKYPIQVQMPQFGVRNIEFLNTTGSSPQSDMTEPNFVDLGNGLGITTYQRGPPSVLTDSSEEEEEGQQQETDETEEGKSFKHQYTDARNKNRGERGSFNSNSSTSGTTRSSSHKASVQRMEEINLYMAQLMHRGGTEDLSRNTTDNTHQPISHDIMSQWNSSSQNKGPSTQTDINSNT

SEQ ID NO: 23575 - protein, 513 aa, Picea abies
MAGGMAVSRPKQGRAELYEGHITAYVILACIVAATGGSLFGYDLGVSGGVTSMDDFLKKFFRHVYERKQHHLRETDYCKYDNQLLTLFTSSLYLSGLVATFGASYITRSKGRRVSIIIGGLSFLLGAILNAAAKNLGMLIVGRILLGAGVGFSNQSVPLYLSEMAPAKVRGGTNNLFQLKTCLGIFVTNVINYFTNKLHPWGWRLSLGLAVIPALLMSIGGYFLPETPNSLVEQGRLQEGRQILEKIRGTKNVQAEFDDLVEASDVARAVKHPFRNLLQRRNRPQLVMGTCIPAFQQLTGNNSFLFYAPVIFQSLGMGNDASLYSAIMTGAVITFGALVSMFTVDRVGRRFLFMEGGTQMIVCHVIISILLKSNFGKGEKIPTGYGVGIVLLICIFYLLAYGWLWGPLSWLVCSEIFPMESLVVCVNLFFTAVIAQSFLALLCHLKYGIFLLFGGLVFIMSVVIYFFLPETKNVPIEEMRFQWAKHWYWKRFMDEYMDNDDENEKGNMTKAAA

SEQ ID NO: 23576 - protein, 551 aa, Spinacia oleracea
MQASTFMVKGNLGFEVQNRRVAGLAGLKGLSSIRSNNLSFVNVNDNNYKSNPCKLSCGSLSMGAGFARLGLDHVMKSSPKYRSVKAQAASGGDLEDATPVKYQGKSSASVLPYVGVACLGAILFGYHLGVVNGALDYLSADLAIAGNTVLQGWVVSILLAGATVGSFTGGSLADKFGRTKTFQLDAIPLAIGAYLCATAQNVQIMMIGRLLCGIGIGISSALVPLYISEISPTEIRGALGSVNQLFICIGILAALVAGLPLAGNPLWWRTMFGIATVPSVLLALGMGFCPESPRWLFQQGKIVEAEKAVAALYGKERVPEVINDLRASVQGSSEPEAGWFDLFSSRYRKVVSVGAALFLFQQMAGINAVVYYSTSVFRSAGIASDVAASALVGASNVIGTAVASSLMDKQGRKSLLMTSFSGMAASMLLLSLSFTWKALAPYSGTLAVVGTVLYVLSFSLGAGPVPALLLPEIFASRIRAKAVALSLGMHWASNFVIGLYFLSVVTKFGISKVYLGFASVCVLAVLYIAGNVVETKGRSLEEIELALSPAV

SEQ ID NO: 23577 - protein, 508 aa, Arabidopsis thaliana
MPSVGIVIGDGKKEYPGKLTLYVTVTCIVAAMGGLIFGYDIGISGGVTTMDSFQQKFFPSVYEKQKKDHDSNQYCRFDSVSLTLFTSSLYLAALCSSLVASYVTRQFGRKISMLLGGVLFCAGALLNGFATAVWMLIVGRLLLGFGIGFTNQSVPLYLSEMAPYKYRGALNIGFQLSITIGILVANVLNFFFSKISWGWRLSLGGAVVPALIITVGSLILPDTPNSMIERGQFRLAEAKLRKIRGVDDIDDEINDLIIASEASKLVEHPWRNLLQRKYRPHLTMAILIPAFQQLTGINVIMFYAPVLFQTIGFGSDAALISAVVTGLVNVGATVVSIYGVDKWGRRFLFLEGGFQMLISQVAVAAAIGAKFGVDGTPGVLPKWYAIVVVLFICIYVAAFAWSWGPLGWLVPSEIFPLEIRSAAQSITVSVNMIFTFLIAQVFLMMLCHLKFGLFIFFAFFVVVMSIFVYLFLPETRGVPIEEMNRVWRSHWYWSKFVDAEKNLTKVVI

SEQ ID NO: 23578 - protein, 510 aa, Ricinus communis
  unsure (1)..(510): unsure at all Xaa locations
MAAGLAITSEGGQYNGRMTSFVALSCMMAAMGGVIFGYDIGVSGGVTSMDPFLKKFFPDVYRKMKEDTEISNYCKFDSQLLTSFTSSLYVAGLVASFFASSVTRAFGRKPSILLGGXVFLAXAALGGAAVNVYMLIFGRVLLGVGVGFANQAVPLYLSEMAPPRYRGAINNGFQFSVGIGALSANLINYGTEKIEGGWGWRISLAMAAVPAAILTFGALFLPETPNSLIQRSNDHERAKLMLQRVRGTTDVQAELDDLIKASIISRTIQHPFKNIMRRKYRPQLVMAVAIPFFQQVTGINVIAFYAPILFRTIGLEESASLLSSIVTGLVGSASTFISMLIVDKLGRRALFIFGGVQMFVAQIMVGSIMAAELGDHGGIGKGYAYIVLILICIYVAGFGWSWGPLGWLVPSEIFPLEIRSAGQSIVVAVSFLFTFVVAQTFLSMLCHFKSGIFFFFGGWVVVMTAFVHFLLPETKKVPIEKMDIVWRDHWFWKKIIGEEAAEENNKMEAA

SEQ ID NO: 23579 - protein, 518 aa, Oryza sativa (japonica cultivar-group)
MAIGAFVESGGGGGGGGGGGYGGRVTAYVVLTCVVAGSGGILFGYDLGISGGVTSMDSFLKRFFPDVYQKKQDTRVSHYCAFDSELLTVFTSSLYIAGLVATLFASSVTRRYGRRTSMLIGGTVFIAGSVFGGAAVNVFMLLINRILLGIGLGFTNQSIPLYLSEMAPPRYRGAINNGFELCISLGILFANVLNYCVVKITAGWGWRISLSMAAVPAAFLTIGAVFLPETPSFIIERDGDTDKARILLQRLRGTTSVQKELDDLVAASNLSRTVQYPFRNIFKRKYRPQLVIALLVPFFNQLTGINVMNFYAPVMFRTIGLKESASLLSSVVNRLCATFANIMAMIVVDRFGRRKLFLVGGIQMILSQLAVGAILAAEFKDYGSMDREYAYLVLITMCVFVAGFAWSWGPLTFLVPTEICPLEIRSAGQSIVVAVVFLMTFVIGQTFLAVLCRIKSGTFFFFAGWICLMTVFVYFFLPETKKLPMEQMEQVWRKHWFWKKIVGEEEEKQAEKTALPSM

SEQ ID NO: 23580 - protein, 520 aa, Oryza sativa (japonica cultivar-group)
MAVGVVAGVESQERRGGGAGTGRVTAFVVLSCVTAGMGGVIFGYDIGIAGGVSSMEPFLRKFFPEVHRRMEGDVRVSNYCKFDSQLLTAFTSSLYVAGLLTTFAASRVTAGRGRRPSMLLGGAAFLAGAAVGGASVDIYMVILGRVLLGVGLGFANQAVPLYLSEMAPSRWRGAFSNGFQLSVGVGALAANVINYGTEKIRGGWGWRVSLALAAVPAGLLTLGALFLPETPNSLIQQGKVERCDVEQLLKKIRGADDVADELDTIVAANSATAGVGGGGLLMLLTQRRYRPQLAMAVMIPFFQQVTGINAIAFYAPVLLRTIGMGESASLLSAVVTGVVGVGATLLSMFAVDRFGRRTLFLAGGAQMLASQVLIGGIMAAKLGDDGGVSRAWAAALILLIAAYVAGFGWSWGPLGWLVPSEVFPLEVRSAGQSVTVATSFVFTVFVAQAFLAMLCRMRAGIFFFFAAWLAAMTAFVYLLLPETKGVPIEEVAGVWRGHWFWSRVVGGDGEEEERNNGGKL

SEQ ID NO: 23581 - protein, 524 aa, Oryza sativa (japonica cultivar-group)
MAPSAAAPEIQELIHHPYDGRVTSFVVLSCVTACLGGILFGYDIGVSGGVTSMDAFLERFFPEVYRRMHGGGERVSNYCRFDSQLLTAFTSSLYVSGLATTFLASHVTARRGRRASMLVAGAAIAAGATVGASAAGLATVILGRVLLGVGVGFGNQAVPLYLSEMAPPSRRGAFSNGFQLCVSVGAFVAQLINFGAEKIAGGWGWRVSLAVAAVPAAFLAVGAVFLPETPNSLVQQGEDHGKVRALLSKIRGSDGAGVDDELDDIVAADRCKVTARRGLTLMLTHRRYRPQLVMAVMIPFFQQMTGINAIAFYAPVLLRTVGMGESAALLAVVIKQVVGIGATLASMLAVDRFGRRTLFLAGGAQMVISQLLIGAIMAAQLGDDGELSQASALLLIVLVAVYVAGFAWSWGPLGWLVPSEIFPLEVRSAGQSIAVAVNFLLTTAVAQSFLAMLCHMKAGIFFFFAAWLVAMTAFVYLLLPETKGLPIEQVGKLWARHWFWRRFVVTDSGVDGEEEGEAIDADKL

SEQ ID NO: 23582 - protein, 534 aa, Oryza sativa (japonica cultivar-group)
MAGGVIVANDGDGSAVDHGGRLTFSVVITCLVAASGGLIFGYDVGISGGVSTMEPFLRRFFPGVVRRMAEARPGNEYCVYDSQALTAFTSSLYVAGLVASLVASRVTRAMGRQAVMVMGGALFFAGGAVTGFAVNIAMLIVGRMLLGFGVGFTNQHDGFDRVVWVLDERNGQAAPLFLAEMAPTRWRGSLTAGFQFFLAVGVVIATVTNYFASRVPWGWRLSLGLAGAPAVVIFLGALFLTDTPSSLVMRGDTARARAALLRVRGAGADVEAELKGIVRAVEVARQGEDGAFRRMAARREYRPYLVFAVAMPMFFQLTGVIVISFFSPLVFRTVGFGSNAALMGNVILGAVNLVCLMLSTLVIDRYGRKVLFMVGGAIMIIAQVGVAWIMGAQVGKNGSEAMARPYAVAVVAFTCLHTAGFGWSWGPLGWVIPGEIFPVDIRSAGQAMNVSIGLGLTFVQTQSFLAMLCRFRYGTFAYYAAWVAVMTVFIAVFLPETKGVPLESMATVWARHWYWKRFAREQPKTSADEPTGTY

SEQ ID NO: 23583 - protein, 501 aa, Oryza sativa (japonica cultivar-group)
MADYGGGGGSGGGLTFPVVVTCLMAASGGLIFGYDIGISGGVSEMESFLEKFFPGLLKGTAHASKDVYCIYNSQALTAFTSSLYAFGMVGTLVASRVTRRTGRQAVMLIGGSMFLVGALVNAAAVNIAMLIIGRMLLGLGLGFSGQATPVYLAEMSPPRWRGGFISGFPLFISVGYLIANLINYGTSRIPVWGWRLSLGLAAFPAAVMVAGAAFIPDTPSSLVLRGKHDLARAALQRVRGKGVDVDAEFNDILAAVEHDRRNDEGAFRRILRREYRPYLVMAIAFPVFLNLTGVAVTAFFSPILFRTVGFESDAALMGAVILGLMNIFGIVGSGFAMDRYGRRLLFMIGGALMFTCQVAMASIVGSQLGHGSKMAKGYAVTVLVMTCAFSASFSWSWGALYWAIPGEIYPVEVRSAGQGVAVALNLGLNFVQAQCFLAMLCCFKYGTFLFYASWLVVMTAFAVAFVPETKGVPLESMGHVFARHWYWGRFVKDHKFGDVST

SEQ ID NO: 23584 - protein, 523 aa, Lycopersicon esculentum
MAGGGFTTSGNGGTHFEAKITPIVIISCIMAATGGLMFGYDVGVSGGVTSMDPFLKKFFPTVYKRTKEPGLDSNYCKYDNQGLQLFTSSLYLAGLTATFFASYTTRKLGRRLTMLIAGCFFIIGVVLNAAAQDLAMLIIGRILLGCGVGFANQAVPLFLSEIAPTRIRGGLNILFQLNVTIGILFANLVNYGTAKISGGWGWRLSLGLAGFPAVLLTLGALFVVETPNSLIERGYLEEGKEVLRKIRGTDNIEPEFLELVEASRVAKQVKHPFRNLLQRKNRPQLIISVALQIFQQFTGINAIMFYAPVLFSTLGFGNSAALYSAVITGAVNVLSTVVSVYSVDKLGRRVLLLEAGVQMLLSQIIIAIILGIKVTDHSDNLSHGWGIFVVVLICTYVSAFAWSWGPLGWLIPSETFPLETRSAGQSVTVCVNLLFTFVMAQAFLSMLCHFKYGIFLFFSGWIFVMSLFVFFLLPETKNVPIEEMTERVWKQHWLWKRFMVDEDDVDMIKKNGHANGYDPTSRL

SEQ ID NO: 23585 - protein, 523 aa, Lycopersicon esculentum
MAGGGFTTSGNGARISRLKSHQLVIISCIMAATGGLMFGYDVGVSGGVTSMDPFLKKFFPTVYKRTKEPGLDSNYCKYDNQGLQLFTSSLYLAGLTATFFASYTTRKLGRRLTMLIAGCFFIIGVVLNAAAQDLAMLIIGRILLGCGVGFANQAVPLFLSEIAPTRIRGGLNILFQLNVTIGILFANLVNYGTAKISGGWGWRLSLGLAGFPAVLLTLGALFVVETPNSLIERGYLEEGKEVLRKIRGTDNIEPEFLELVEASRVAKQVKHPFRNLLQRKNRPQLIISVALQIFQQFTGINAIMFYAPVLFSTLGFGNSAALYSAVITGAVNVLSTVVSVYSVDKLGRRVLLLEAGVQMLLSQIIIAIILGIKVTDHSDNLSHGWGIFVVVLICTYVSAFAWSWGPLGWLIPSETFPLETRSAGQSVTVCVNLLFTFVMAQAFLSMLCHFKYGIFLFFSGWIFVMSLFVFFLVPETKNVPIEEMTERVWKQHWLWKRFMVNEDDVDMIKKNGHANGYDPTSRL

SEQ ID NO: 23586 - protein, 292 aa, Lycopersicon esculentum
NHDEAKARLKRIRGIEDVDEEFNDLVIASEASRKIEHPWRNLLQKKYRPHLTMAIMIPFFQQLTGINVIMFYAPVLFKTIGFGTDASLMSAVITGGINVIATIVSIYYVDKLGRRFLFLEGGIQMLFSQIAVAILIAIKFGVNGTPGELPKWYAIVVVIFICVYVAGFAWSWGPLGWLVPSEIFPLEIRSAAQSINVSVNMIFTFAVAQVFLTMLCHLKFGLFLFFAFFVVIMTVFIYFFLPETKNIPIEEMVIVWKEHWFWSKFMTEVDYPGTRNGTAVEMAKGGAGYKIV

SEQ ID NO: 23587 - protein, 520 aa, Oryza sativa
  unsure (1)..(520): unsure at all Xaa locations
MAGGAMVQTVGGKTYPGKMTAFVFFTCLVASSGGLIFGYDIGISGGVTSMDSFLSEFFPSVYAQAKASKDTNQYCKFDSQLLTLFTSSLYLAALATSFVAAWVTRVFGRKWSMFCGGVTFLAGSALNGAATDVMMLILGRILLGIGVGFANQSVPLYLSEMAPANLRGMLNIGFQLMTTIGILSANLINYATSSIEGGWGWRIGLGLAGVPALIITLGALVLPDTPNSLIARGYAGDAKRVLVKIRGTDDVHDEYDDMVAASEEAASIEHPWRNILHRKYRPQLTIAILIPCFQQLTGINVIMFYAPVLFLTIGFAGDASLMSAVITGLVNMFATVVSIISVDRLGRRVLFLQGGTQIFISQXLFGXLIALQFGVAGVXGEMSRSYAILLVLFICMYVAGFAWSWGPLGWLVPSEVFALEIRSAGQSIAVCVNMMLTFVIGQAFLTMLCHLKFGLFYFFAGWMLVMTTFVALFLPETKGVPIEEMNHVWSRHWFWGSYVTAHDVAGAGAGGGGNRRSHNV

SEQ ID NO: 23588 - protein, 512 aa, Oryza sativa; identical to SEQ ID NO: 23495

SEQ ID NO: 23589 - protein, 523 aa, Oryza sativa
MPGGGAMVAASGAGRPEYPGGLTMFVSMACLVAATGGLIFGYDIGVSGGVTSMDPFLSRFFPSVYRAQSAAAAAAGGNQYCRFDSQLLTMFTSSLYLAALASSLGAATVTRVAGRKWSMFAGGLVFLAGCALNGAAANVAMLIVGRVLLGVGIGFANQSVPVYLSEMAPARMRGMLNNGFQMMITTGVLAANLINYGTARIAGGWGWRLSLALAAVPAAVMTAGALFLPETPNSLLERGRRGEARRMLQRVRGEGVDMEDEYNDLVAAGEASHAVASPWRDILRRRNRPPLVMAVAIPLFQQLTGINVIMFYAPVLFRTLGFGGGASLMSAVITGGVNMAATLVSVLAVDRVGRRALFLEGGAQMVASQAAVGALIGARLGWSGTAAIPAGYAAAVVAAMCVYVAAFAWSWGPLAWLVPSEVMPLEVRPAGQSITVAVNMAMTFAVAQAFLPLLCRLRFVLFFFFAGWVAAMTAFVALFVPETKGVPIEDMAAVWSDHWYWKRFVDGDGDGARRRGDIEMGHK

SEQ ID NO: 23590 - protein, 522 aa, Oryza sativa
MAAATAADVAEDTASVYSGKLTLYVFLTCGVAATGGLIIGYDIGISGGVTSMDTFLGKFFPSVLHQEQTAQGTSQYCKFNSQPLTAFTSSLYLAALVASFFVASFTRALGRKWSMFGGGVSFLAGATLNGAARNVAMLIVGRILLGIGVAFCGLSTPIYLSEMAPPRLRGMLNIGLQLMITVGIFSANLVNYGAAKIRGGWGWRVSLGLAAAPACVIAVGSLFLPDSPSSLINRGRHEQARRVLRRIRGTDEVDDEYGDLVAAASEIEVYSGCSARRRPWRDVLQRRYRPQLAMAVLIPFFQQLTGINVIMFYAPVLFKTIGLGGDASLMSAVITGLVNIVATFVSIATVDSLGRRKLLFQGGCQMLVSQVIIGTLIGVVFGTSGDGNISRALAVCIVVFICVYVAGFAWSWGPLGVLLPSEIFPLEVRPAGQSISVAVNMLCTFAVAEAFLPMLCHMRFGLFYFFSGWVLVMTLFVSAFLPETKGVPIEKMTVVWRTHWFWGRFYCNQDADAHVQVANSKV

SEQ ID NO: 23591 - protein, 523 aa, Oryza sativa
  unsure (1)..(523): unsure at all Xaa locations
MAAATAADVAEDTASVYSGKLTLYVFLTCGVAATGGLIIGYDIGISGGVTSMDTFLGKFFPSVLHQEQTAQGTSQYCKFNSQPLTAFTSSLYLAALVASFFVASFTRALGRKWSMFGGGVSFLAGATLNGAARNVAMLIVGRILLGIGVAFCGLSTPIYLSEMAPPRLRGMLNIGLQLMITVGIFSANLVNYGAAKIRGGWGWRVSXLGLAAAPACVIAVGSLFLPDSPSSLINRGRHEQARRVLRRIRGTDEVDDEYGDLVAAASEIEVYSGCSARRRPWRDVLQRRYRPQLAMAVLIPFFQQLTGINVIMFYAPVLFKTIGLGGDASLMSAVITGLVNIVATFVSIATVDSLGRRKLLFQGGCQMLVSQVIIGTLIGVVFGTSGDGNISRALAVCIVVFICVYVAGFAWSWGPLGVLLPSEIFPLEVRPAGQSISVAVNMLCTFAVAEAFLPMLCHMRFGLFYFFSGWVLVMTLFVSAFLPETKGVPIEKMTVVWRTHWFWGRFYCNQDADAHVQVANSKV

SEQ ID NO: 23592 - protein, 523 aa, Zea mays
MAGGGIVNTGGGKDYPGKLTLFVLLTCIVAATGGLIFGYDIGISGGVTSMNPFLEKFFPEVYRKKQEAKTNQYCKYDNQLLQTFTSSLYLAALVASFFAATVTRAVGRKWSMLVGGLTFLVGAALNGAAQNIAMLIVGRILLGVGVGFANQSVPVYLSEMAPARLRGMLNIGFQLMITIGILAAELINYGTNKIKAGYGWRVSLALAAVPAAIITLGSLFLPDTPNSLLERGHPEEARRMLRRIRGTDDIGEEYADLVAASEEARQVRHPWRNILRRRYRAQLTMAVAIPFFQQLTGINVIMFYAPVLFDTLGFKNDASLMSSVITGLVNVFATVVSIVTVDRVGRRKLFLQGGAQMIVCQLIVGTLIAAKFGTSGTGDIAKGYAAVVVVFICAYVAGFAWSWGPLGWLVPSEIFPLEIRPAGQSINVSVNMFFTFCIAQAFLTMLCHFKFGLFYFFAGWVVIMTVFIAFFLPETKNVPIEEMVLVWKSHWFWKRFIADEDVHVGIGNNHPAKNGSDTKGADA

SEQ ID NO: 23593 - protein, 539 aa, Zea mays
  unsure (1)..(539): unsure at all Xaa locations
MAGGVVVNAAGGKTYPGRMTPFVFFTCLVASSGGLIFGYDIGISGGVTSMASFLKEFFPSVYAKAAANKDTNQYCKFDSQLLTLFTSSLYLAALATSFVAASVTRVFGRKWSMFCGGVTFLXAGSALNGAATDVMMLIMGRILLGVGVGFANQSVPLYLSEMAPAKLRGMLNIGFQLMTTIGILAANLINFWTAGIEGGWGWRIGLGXLAGVPALIITLGALVLPDTPNSLIARGFNDDAKAVLVKIRGTDDVQDEYDDMVAASEEANAIEHPWRNILERRYRPQLTVAALIPFFQQLTGINVIMFYAPVLFLTIGFGDDASLMAAVITGLVNMFATVVSIVCVDRLGRRALFLQGGTQMFVSQIVVGTLIALQFGTAGVGEMSRSNAWLLVLFICLYVAGFAWSWGPLGWLVPSEVFALEVRSAGQSIAVCVNMLLTFIIGQAFLSMLCSLKFGLFYFFAGWMFIMTTFIALFLPETKGVPIEEMNLVWSRHWFWGKYVNVDTQHGGASPRSNGVXSEQAAATPRHLTWPCMHTYTII

SEQ ID NO: 23594 - protein, 536 aa, Zea mays
MAVAAPAAVSTGAGQGKEYPGGLTLYVLLTCAVAATGGLVCGYDIGISGGVTSMDAFLHKFFPSVYRKEQTARGGGSQYCKFDSQLLTAFTSSLYLAALAASFFVASVAHSLGRKWCMFGGGVSFLAGAALNAAAQDVAMLIVGRILLGIGVGFAGLSIPIYLSEMAPHHLRGTLNIGFQLMITVGIFSANLVNYGVDKIRGGWGWRLSLGLAAVPAAVITVGSLFLPDTPNSLIRRGYHEQARQVLARIRGADVDVADEYGDLVSASEASAAVRRPWLDVLGRRYRPQLTMAVLVPFFQQLTGINVIMFYAPVLFKTIGLGGDASLMSAVITGLVNIVATFVSIATVDRLGRRSLFLQGGCQMLVCQIVIGTLIGVQFGASGDGAAIPKASAATVVAFICIYVAGFAWSWGPLGVLVPSEIFPLEIRPAGQGINVAVNMMCTFAVAQAFLPMLCHLRFGLFYFFGGWVLVMTLFVAAFLPETKGVPVEKMGTVWRTHWFWGRFVADAGMDGRAGNRDSAFHKGKDIAIESRSRPV

SEQ ID NO: 23595 - protein, 555 aa, Schizosaccharomyces pombe
MNRFITSILVVFISMSGWLQGADTGSISGILGMRDFQSRFADRYNPISNSYSYSAWRQALLTGTINAGCLFGAMLSSPFTERIGKKYSICFFSGVYIIAELLLVTAVPSWIQVLVGKILAGVGIGALSVLSPGYQSEVAPPQIRGAVVATYQIFSTGAALVAACINMGTHKLRKTASWRTSFGINMLWGILLMVGVLFLPESPRYLIYKGRDEEALRIMCNMAELSPESEIIQTNFNTIKSDIEIEMAGGKARWIEIFGKDIRYRTCLGFLVMLFRELIGNNYYFYYATQVFKGTGMTDIFLPAVILGAINFGTTFGALYTIDNLGRRNPLIFGAAFQSICFFIYAAVGDRKLIYKNGTSDHRAGSVMIVFSCLFLFSYCCSWGPMGWVIVGETFPIRYRSKCASVATSGNWLGNFMISFFTPFINNAIGFKLGYIYACINLFSSFMIFFLAKETKGLTLEEVNDLYMSNIKPWESYKYVREIESHRIHFSKEEEKREREKSKGIRGQEEEFIENADEDNNDSSSSSGSVVSAVKPRRSAVSNDRFSEDSHPTYI

SEQ ID NO: 23596 - protein, 575 aa, Schizosaccharomyces pombe
MSISSKDFQNVTSAGFADDTFAADTFAADKKSPFESSVFENKTQVLPVDSVSRLSNGARSRSNSNISLSEPHALNDTVEDQPVSKWVWVLAFAAGIGGLLFGYDTGVISGALVVIGTSLGGHELTNGGKEFITSATSLGALLGGIIAGALADFFGRKPVIAIASIIIIVGSIVQVTAHHLWHMIVGRFVIGWGVGIASLIIPLYLSEIAPSKIRGRLVIIYVLLITAGQVIAYGIDTAFEHVHNGWRWMVGLAMVPAAFQLFILIWLPESPRLLVKKERSQEAYNTLARIYPTAHPYEIKTKLYLIQEGVRDPFSGSRWQKIVKTFKELYFNPSNFRALILACGLQAMQQLSGFNSLMYFSSTIFEVVGFNNPTATGLIIAATNFVFTIVAFGVIDFFGRRILLLLTVWGMIAALIVCAVAFHFLPKDENGNYTSGQSNAWAIVVLISMIVYVASYASGLGNLPWQQSELFPMSVRGLGTGMSTAVNWAGNLGIGASFLTLMSEITPTGTFALYGGLCFLGWLGALFCYPDLTDYTIEEIGELLKHGFGVRESMRHLKRVRQERAWSREDKEQNN

SEQ ID NO: 23597 - protein, 531 aa, Schizosaccharomyces pombe
MGFKRGKNFTLVMLIFVSMAGWMFGADTGSIGGVTSMRDFRERYADRYDPITDQYSLSSARQGLLTGMVNVGSLFGCIISSPIADRFGKRLSIIGFCAVYIIGIIVQVTAVPSWVQIMVAKIWTGIGIGALSVLAPGYQSETAPPSIRGTVVVTYQLFVTGGIFIAACINMGTHKLHKTAQWRVSIGINLLWGIITMIGILFLPESPRYLIQVGKDEEAVRVLSESAELFPDSEEVQNEYHRLKSSIDEEFAGGPCSWASIFGKDIRYRTFLGMFVMSLQQLTGNNYFFYYGFSVMQGAGINSPYLSAMILDAVNFGCTFGGMYVLERFGRRNPLIIGGIWQSICFFIYSAVGSRALYHKNGTSNTRAGAVMIVMACLFIFGFAQTWAPAAYVIVGESYPVRYRSKCAAVATASNWLWNFLISFFTPFIQASIGFKYGYVFASCNLTGAIVIFLFAKETKGLTLEEINELYMSVIKPWESGNFKLNYSEQKKVEKEKSRKGGARGESVEYVERASNTDSSPQYSSHEEDYA

SEQ ID NO: 23598 - protein, 557 aa, Schizosaccharomyces pombe
MSKTLTITMLLFVSMAGWMFGADTGSIGGITNMRDFQSRFADRYNPVTDTYSYSSARQGLITGMVNVGSFFGCLISSPTTDRIGKRNSIIGFCVIYLIGVIIQVTAVPSWVQIMVAKIWTGLGIGALSVLAPGYQSEVAPPHIRGTIVVTYQLCVTAGIFIAACINMGTHKLYKTAQWRVSIGINLLWGIITLVGVSFLSESPRYLVSIGKDDEAIQVMCKNAELPPDSDIIQTEYKQIKSDCEAAVEGGPCTWPEIFGKEIRYRTFLGMAIMSFNQLTGCNYYFYYGTQVFKGTGMESPYLASLILDAVNFGCTFGGLFVLEYCGRRVPLIIGGVWQSICFFIYAAVGNRALTRKNGTSNHRAGAVMIVFSCLFIFSFAQTWGPAAYVIVGESYPIRYRSKCAAVATTSNWLWNFLISFFTPFITNSIGFKYGYIFASCNLCASIVTFLFAHESKGLTLEEINELYLSDAKPWMSRPKNLSEMAEAKEVEREETRPKGESARYLEHADSNSDSEDLSSSANNDVHEPVARQDPFNENEVEKSRTRPSQESYTTSSN

SEQ ID NO: 23599 - protein, 557 aa, Schizosaccharomyces pombe
MGRTLTSVLVVFISMAGWLGGADTGSISGILGMRDFQSRFADRYNPITNSYSYSAWRQALLTGTVNAGCLFGAMLSSPFTEAIGKKYSIAFFSGCYIIGQILLVTAVPSWVQIMVGKLFTGLTIGALSVLSPGYQSEVAPPQIRGAVVSTYQLFQTCGTLIAACINMGTHKLRKTASWRTSFGINILWGIFLMVGVLFLPESPRYLIYKGRDEEALRIMCQTAELDPESEIIQTNFNTIKSDIEMEMAGGKARWPEVFGKEVRYRTVLGFLTMLLRELIGNNYYFYYATQVFKGTGMTDIFLPAVILGAINFGTTFGALYTIDNLGRRNPLIFGAAFQSICFFIYAAVGDRKLIYKNGTSDHRAGAVMIVFSCLFLFSYCCSWGPMGWVIVGETFPIRYRSKCAAVATSGNWLGNFMVSFFTPFISNSIGFKLGYIYACINMTSAFQIFLMAKETKGLTLEEVNELYESDIKPWDSYKYVRQIESRRIHFSKEEEKREREKSKGYRGQEERFIENADGADNDDSSASSESFASAGAHSRSVFPRRSNVSEESHPTWV

SEQ ID NO: 23600 - protein, 519 aa, Schizosaccharomyces pombe
MLIFVSMAGWMFGADTRSIGGVTSMRDFRERYADRYDPITDQYSLSSARQGLLTGMVNVGSLFGCIISSPIADRFGKRLSIIGFCAVYIIGIIVQVTAVPSWVQIMVAKIWTGIGIGALSVLAPGYQSETAPPSIRGTVVVTYQLFVTGGIFIAACINMGTHKLHKTAQWRVSIGINLLWGIITMIGILFLPESPRYLIQVGKDEEAVRVLSESAELFPDSEEVQNEYHRLKSSIDEEFAGGPCSWASIFGKDIRYRTFLGMFVMSLQQLTGNNYFFYYGFSVMQGAGINSPYLSAMILDAVNFGCTFGGMYVLERFGRRNPLIIGGIWQSICFFIYSAVGSRALYHKNGTSNTRAGAVMIVMACLFIFGFAQTWAPAAYVIVGESYPVRYRSKCAAVATASNWLWNFLISFFTPFIQASIGFKYGYVFASCNLTGAIVIFLFAKETKGLTLEEINELYMSVIKPWESGNFKLNYSEQKKVEKEKSRKGGARGESVEYVERASNTDSSPQYSSHEEDYA

SEQ ID NO: 23601 - protein, 547 aa, Schizosaccharomyces pombe
MGKTLTIVMLVFVSMAGWMFGADTGSIGGITNMRDFQSRFADRYNPVTDTYSYSSARQGLITGMVNVGSMTGCILSSPLMDRIGKRVSIMFWTIVYLIGIILQVTAVPSWVQIMVAKIWTGLAIGALSVLAPGFQSEVAPATLRGTIVTTYQLAVTGGIFIAACINMGTHKLHKTAQWRVSMGINLLWGIIMFIGISFLPESPRYLIAIGKDEEALDIMCKNNVLPREHEIIQTEYHVIKTDCEAEMAGGPATWGDILGADIRYRTFLGLGVMSLQQLTGDNYYFYYGFEVFEGTGMNSPYLSALILDAVNFGCTFGGLFVLEFFGRRMPLIIGGVWQSITFFIYAAVGNRALTRKNGTSNHRAGAVMIVFSCLFIFSFAQTWGPAAYVIVGESYPIRYRSKCAAVATTGNWLWGFLITFFTPFISDSIGFKYGYIFAACNLCAACIIFLFAHETKGLTLEEINELYLSGAKPWMPRPENLGQAAKQQQEVLEKSRGVQGESAAHLENVDNEGMEDTSSNDITSSTSSSEGRAKPESNYVDEQDRYA

SEQ ID NO: 23602 - protein, 535 aa, Schizosaccharomyces pombe
MAKILTIVMLVFVSMAGWMFGADTGSIGGITNMRDFQSRYADRYDPVTDTYSYSSARQGLLVGMVNTGTTVGCLLSSPLGDRFGKRKCIMGWTLVYITGVIVQLTTIPSWVQMMVAKIWTGLGIGALSVIAPGYQSESSPPHIRGAIVTTYQLFITLGIFIAACINMGTHKYTTHPEAQWRVPIGINLLWGILMFFGMLFLPESPRYLAVKGRNEECMKILTRNAGLPADHPIMQKEYNAIQADVEAELAGGPCSWPQIFSNEIRYRTLLGMGVMAFQQLTGNNYFFYYGTQVFRGTGLNSPFLAALILDAVNFGCTFGAIFVLEYFGRRGPLIVGGVWQSICFFIYASVGDRALTRPNGTSNHRAGAVMIVFSCLFIFSFAQTWAPAAYVIVGESYPIRYRSKCAAVATASNWFWNFMISFFTPFISNSIGFKYGYVFAACNLCAAIIIFLFAKETKGLTLEEINQLYLSNIKPWNTGAYQRDREDIKQSDSEKERGPTSKLHEYVEHAPNSYASTHSTESENYPQQVTNPVGL

SEQ ID NO: 23603 - protein, 518 aa, Schizosaccharomyces pombe
MRDFQSRFADRYNQITNSYSYSSSRQGLITGMVNVGSFFGCLLSSPVADKIGKRLSIIVWTTVYLIGIIIQVTTVPSWVQILVAKIWTGLSIGALSVITPGYQSEVAPAIMRGAIVTTYQLFITLGIFIAACINMGTHKYSHGTTAQWRISIGINLLWGIITLVGIIFLPESPRYLIAIGKDDEALKIMCYNNDLPLEHEIIQTEYHTIKSDCDAELAGGPARWPEIFNANIRYRTFLGMAVMMFQQLTGANYYFYYGTQVFRGTGMDSPYLAALIPDAVNCGCTFGAIFVLEFFGRRSPLIVGGIWQYICFFIYAAVGDRALYHKNGTSNHRAGAVMIVFSCLFIFSFSQTWAPAAYVIVGESYPVRYRSKCAAVATSANWFWNFLISFFTPFITNSIGFKYGYIFASCNLTGAAIIFLFVHETKGRTLEEINTMYASNLKPWMPHPEGYREFGREQNNATLKSHIGLNGETTELIENTDNQGDSGSFQTSTPDDSRPEQNQASATYIRPDKREPRL

SEQ ID NO: 23604 - protein, 546 aa, Schizosaccharomyces pombe
MGKNLTIVMLVFVSMAGWMFGADTGSIGGITNMRDFQSRFADRYNPVTDSYSYSSARQGLITGMVNVGSFFGCFLSSPLMDRIGKRTSIMFWTIVYLIGIILQVTAVPSWVQIMVAKIWTGLSIGALSVLAPGFQSEVAPADLRGTIVTTYQLAVTGGIFIAACINMGTHKLHKTAQWRVSMGINLLWGIITFIGISFLPESPRYLISVGRDEEALQIMAKNNDLPIEHEVIQTEYHVIKSDCEAELAGGPATWPEIFGPDIRYRTFLGLGVMSLQQLTGDNYYFYYGFEVFEGTGMNSPYLSALILDAVNFGCTFGGLFVLEFFGRRMPLIIGALWQSITFFIYAAVGNRALTRKNGTSNHRAGAVMIVFSCLFIFSFAQTWGPAAYVIVGESYPIRYRSKCAAVATTGNWLWGFLISFFTPFITNSIGFKYGYIFAACNLCAACIIFLFAHETKGLTLEEINELYISGAKPWMPRPKNLGNFTKQQEEVREKSRGVQGESAAHLENVDGEEGIEDSSNDISSTTSSDGRAKPESSYHDQEEQFA

SEQ ID NO: 23605 - protein, 376 aa, Schizosaccharomyces pombe
IMAASRNVAMMVVGRFIVGYGIGLTSLIVPMYITELAPARLRGRLVIIYVVFITGGQLIAYSLNAAFEHVHQGWRIMFGIGAAPALGQLISLFWTPESPRYLLRHHHVEKVYKILSRIHPEAKPAEIAYKVSLIQEGVKVDFPEGNKFQHFFHSLKVLFTVPSNRRSLFIGCFLQWFQQFSGTNAIQYFSAIIFQSVGFKNSISVSMVVGATNFVFTIVAFMFIDRIGRRRILLCTSAVMIAGLALCAIAYHFLPADTTQNTHSGWQYVVIASIIIFLASYASGIGNIPWQQAELFPMEVRALGAGFSTAINWVGNLIISASFLTMMESITPTGTFALFAGFCFVGLVTSYFTYPELAGMFIENIHKLLEKGFWQA

SEQ ID NO: 23606 - protein, 509 aa, Pichia angusta
MVKLQSYYPLFRPGKPTQHILTVTCMFAFILYGFEQGALANVQNEVVFQSQFGHPQGNYLGIIVAIYNLGSFFGSMANIWIGDKLGRKRAIWLGFTLVTIGVILQCSSYSVVQLFIGRFISGLGTGFETSTTPMYQSEVCHENHRGGLVAAEPQGVAFGITVSYWIGYGCSKRTDQVSWRLPVGIQMLFAVLGIVMLFFCPESPRWLMKVGRTQDARYSLATINGVPEDHPRISAIIDDILYLQKIEGSGDKITWGDILMGRDAMHGRFRIMLTVFGQFWNQFGGINLVVYYVPMVLENNVGLSSNLATILGGCIMLTFFATGFIPTLFLDKMGRRFAMASGSAGQCISMLLVTILLRVGTKESSVAATAFFFTFIGFFGYAMNCVPWVYAAEVLPLQLRAKGNAISVATNWICNFVIAMITPIMTQNLAWKTYIVFTLTNAVATIHFFVFYPETSKRTLEDIENIFLDSHTIFYGLQEIKRTPTERLTEKLIDIEHVESVEEGSPESD

SEQ ID NO: 23607 - protein, 553 aa, Pichia stipitis
MSSQDIPSGVQTPSNASFLEKDEDKIEEVPQNHDATLVALESKGISEYLLICFFCLLVAFGGFVFGFDTGTISGFVNMSDFLERFGQTRADGTHYLSNVRVGLLVSIFNIGCAIGGIFLSKIGDVYGRRVGIMASMVIYVVGIIVQIASQHAWYQVMIGRAITGLAVGTVSVLSPLFIGESSPKHLRGTLVYCFQLCITLGIFIGYCVTYGTKRLSDSRQWRVPLGLCFLWAIFLVVGMLAMPESPRYLVEKKRIEDAKKSVARSNKLSPEDPSVYTEIQLIQAGIDREAIAGSASWTELITGKPAIFRRVVMGIIMQSLQQLTGVNYFFYYGTTIFQAVGLKDSFQTSIILGVVNFAATFIGIWAIERFGRRSCLLVGSAGMFVCFIIYSTIGSFHLYKDGEYNNDNTYKPSGNALIFITCLFIVFFASTWAGGVYTIISESYPLRIRSKAMAIATAANWVFGFLISFFTPFIVSAIHFKFGYVFSGCLLFSFFYVYFFVVETKGLSLEDVDELYASNVVPWKSSKWVPPSTAAMATEAGYAADEKPVDEHV

SEQ ID NO: 23608 - protein, 550 aa, Pichia stipitis
MSSQDLPSGAQTPIDGSSILEDKVEQSSSSNSQSDLASIPATGIKAYLLVCFFCMLVAFGGFVFGFDTGTISGFLNMSDFLSRFGQDGSEGKYLSDIRVGLIVSIFNIGCAIGGIFLSKIGDVYGRRIGIISAMVVYVVGIIIQISSQDKWYQLTIGRGVTGLAVGTVSVLSPMFISESAPKHLRGTLVYCYQLCITLGIFIGYCVTYGTKDLNDSRQWRVPLGLCFLWAIFLVVGMLAMPESPRFLIEKKRIEEAKKSLARSNKLSPEDPGVYTELQLIQAGIDREAAAGSASWMELITGKPAIFRRVIMGIILQSLQQLTGVNYFFYYGTTIFQAVGLQDSFQTSIILGTVNFLSTFVGIWAIERFGRRQCLLVGSAGMFVCFIIYSVIGTTHLFIDGVVDNDNTRQLSGNAMIFITCLFIFFFACTWAGGVFTIISESYPLRIRSKAMSIATAANWMWGFLISFCTPFIVNAINFKFGFVFTGCLLFSFFYVYFFVSETKGLSLEEVDELYAEGIAPWKSGAWVPPSAQQQMQNSTYGAEAKEQEQV

SEQ ID NO: 23609 - protein, 550 aa, Pichia stipitis
MSSQDLPSGAQTPIDGSSILEDKVEQSSSSNSQSDLASIPATGIKAYLLVCFFCMLVAFGGFVFGFDTGTISGFLNMSDFLSRFGQDGSEGKYLSDIRVGLIVSIFNIGCAIGGIFLSKIGDVYGRRIGIISAMVVYVVGIIIQISSQDKWYQLTIGRGVTGLAVGTVSVLSPMFISESAPKHLRGTLVYCYQLCITLGIFIGYCVTYGTKDLNDSRQWRVPLGLCFLWAIFLVVGMLAMPESPRFLIEKKRIEEAKKSLARSNKLSPEDPGVYTEVQLIQAGIDREAAAGSASWMELITGKPAIFRRVIMGIILQSLQQLTGVNYFFYYGTTIFQAVGLQDSFQTSIILGTVNFLSTFVGIWAIERFGRRQCLLVGSAGMFVCFIIYSVIGTTHLFIDGVVDNDNTRQLSGNAMIFITCLFIFFFACTWAGGVFTIISESYPLRIRSKAMSIATAANWMWGFLISFCTPFIVNAINFKFGFVFTGCLLFSFFYVYFFVSETKGLSLEEVDELYAEGIAPWKSGAWVPPSAQQQMQNSTYGAEAKEQEQV

SEQ ID NO: 23610 - protein, 570 aa, Saccharomyces cerevisiae
MNSTPDLISPQKSNSSNSYELESGRSKAMNTPEGKNESFHDNLSESQVQPAVAPPNTGKGVYVTVSICCVMVAFGGFIFGWDTGTISGFVAQTDFLRRFGMKHHDGSHYLSKVRTGLIVSIFNIGCAIGGIVLAKLGDMYGRRIGLIVVVVIYTIGIIIQIASINKWYQYFIGRIISGLGVGGITVLSPMLISEVAPSEMRGTLVSCYQVMITLGIFLGYCTNFGTKNYSNSVQWRVPLGLCFAWALFMIGGMMFVPESPRYLVEAGRIDEARASLAKVNKCPPDHPYIQYELETIEASVEEMRAAGTASWGELFTGKPAMFQRTMMGIMIQSLQQLTGDNYFFYYGTIVFQAVGLSDSFETSIVFGVVNFFSTCCSLYTVDRFGRRNCLMWGAVGMVCCYVVYASVGVTRLWPNGQDQPSSKGAGNCMIVFACFYIFCFATTWAPIAYVVISECFPLRVKSKCMSIASAANWIWGFLISFFTPFITGAINFYYGYVFMGCMVFAYFYVFFFVPETKGLSLEEVNDMYAEGVLPWKSASWVPVSKRGADYNADDLMHDDQPFYKSLFSRK

SEQ ID NO: 23611 - protein, 569 aa, Saccharomyces cerevisiae
MNSTPDLISPQKSNSSNSYELESGRSKAMNTPEGKNESFHDNLSESQVQPAVAPPNTGKGVYVTVSICCMVAFGGFIFGWDTGTISGFVAQTDFLRRFGMKHHDGSHYLSKVRTGLIVSIFNIGCAIGGIVLAKLGDMYGRRIGLIVVVVIYTIGIIIQIASINKWYQYFIGRIISGLGVGGITVLSPMLISEVAPSEMRGTLVSCYQVMITLGIFLGYCTNFGTKNYSNSVQWRVPLGLCFAWALFMIGGMMFVPESPRYLVEAGRIDEARASLAKVNKCPPDHPYIQYELETIEASVEEMRAAGTASWGELFTGKPAMFQRTMMGIMIQSLQQLTGDNYFFYYGTIVFQAVGLSDSFETSIVFGVVNFFSTCCSLYTVDRFGRRNCLMWGAVGMVCCYVVYASVGVTRLWPNGQDQPSSKGAGNCMIVFACFYIFCFATTWAPIAYVVISECFPLRVKSKCMSIATAANWIWGFLISFFTPFITGAINFYYGYVFMGCMVFAYFYVFFFVPETKGLSLEEVNDMYAEGVLPWKSASWVPVSKRGADYNADDLMHDDQPFYKSLFSRK

SEQ ID NO: 23612 - protein, 564 aa, Saccharomyces cerevisiae
MQSSTESDRDIQDGPDADIHVAPPVEKEWSDGFDDNEVINGDNVEPPKRGLIGYLVIYLLCYPISFGGFLPGWDSGITAGFINMDNFKMNFGSYKHSTGEYYLSNVRMGLLVAMFSIGCAIGGLIFARLADTLGRRLAIVIVVLVYMVGAIIQISSNHKWYQYFVGKIIYGLGAGGCSVLCPMLLSEIAPTDLRGGLVSLYQLNMTFGIFLGYCSVYGTRKYDNTAQWRVPLGLCFLWTLIIIIGMLLVPESPRYLIECERHEEARASIAKINKVSPEDPWVLKQADEINAGVLAQRELGEASWKELFSVKTKVLQRLITGILVQTFLQLTGENYFFFYGTTIFKSVGLTDGFETSIVLGTVNFFSTIIAVMVVDKIGRRKCLLFGAAGMMACMVIFASIGVKCLYPHGQDGPSSKGAGNAMIVFTCFYIFCFATTWAPVAYIVVAESFPSKVKSRAMSISTACNWLWQFLIGFFTPFITGSIHFYYGYVFVGCLVAMFLYVFFFLPETIGLSLEEIQLLYEEGIKPWKSASWVPPSRRGIPSEESKTEKKDWKKFLKFSKGSD

SEQ ID NO: 23613 - protein, 569 aa, Saccharomyces cerevisiae
MTDRKTNLPEEPIFEEAEDDGCPSIENSSHLSVPTVEENKDFSEYNGEEAEEVVVPEKPASAYATVSIMCLCMAFGGFMSGWDTGTISGFVNQTDFLRRFGNYSHSKNTYYLSNVRTGLIVSIFNVGSAIGCLFLSKLGDIYGRCMGLIIVIVVYMVGIVIQIASIDKWYQYFIGRIIAGIGAGSISVLAPMLISETAPKHIRGTLLACWQLMVTFAIFLGYCTNYGTKTYSNSVQWRVPLGLCFAWAIIMIGGMTFVPESPRFLVQVGKIEQAKASFAKSNKLSVDDPAVVAEIDLLVAGVEAEEAMGTASWKELFSRKTKVFQRLTMTVMINSLQQLTGDNYFFYYGTTIFKSVGMNDSFETSIVLGIVNFASCFFSLYSVDKLGRRRCLLLGAATMTACMVIYASVGVTRLYPNGKSEPSSKGAGNCTIVFTCFYIFCFSCTWGPVCYVIISETFPLRVRSKCMSVATAANLLWGFLIGFFTPFITSAINFYYGYVFMGCLAFSYFYVFFFVPETKGLTLEEVDEMWMDGVLPWKSESWVPASRRDGDYDNEKLQHDEKPFYKRMF

SEQ ID NO: 23614 - protein, 567 aa, Saccharomyces cerevisiae
MASEQSSPEINADNLNSSAADVHVQPPGEKEWSDGFYDKEVINGNTPDAPKRGFLGYLIIYLLCYPVSFGGFLPGWDSGITAGFINMDNFKMNFGSYKHSTGEYYLSNVRMGLLVAMFSVGCSIGGVAFARLADTLGRRLAIVIVVLVYMVGAIIQISSNHKWYQYFVGKIIYGLGAGGCSVLCPMLLSEIAPTDLRGGLVSLYQLNMTFGIFLGYCSVYGTRKYSNTAQWRIPVGLCFLWALIIIVGMLLVPESPRYLIECERHEEACVSIAKINKVSPEDPWVLKQADEINAGVLAQRELGEASWKELFSVKTKVLQRLITGILVQTFLQLTGENYFFFYGTTIFKSVGLTDGFETSIVLGTVNFFSTIIAVMVVDKIGRRKCLLFGAASMMACMVIFASIGVKCLYPHGQDGPSSKGAGNAMIVFTCFYIFCFATTWAPVAYIVVAESFPSKVKSKAMSISTAFNWLWQFLIGFFTPFITGSIHFYYGYVFVGCLVAMFLYVFFFLPETIGLSLEEIQLLYEEGIKPWKSASWVPPSRRGASSRETEAKKKSWKEVLKFPKSFN

SEQ ID NO: 23615 - protein, 567 aa, Saccharomyces cerevisiae
MASEQSSPEINADNLNSSAADVHVQPPGEKEWSDGFYDKEVINGNTPDAPKRGFLGYLIIYLLCYPVSFGGFLPGWDSGITAGFINMDNFKMNFGSYKHSTGEYYLSNVRMGLLVAMFSVGCSIGGVAFARLADTLGRRLAIVIVVLVYMVGAIIQISSNHKWYQYFVGKIIYGLGAGGCSVLCPMLLSEIAPTDLRGGLVSLYQLNMTFGIFLGYCSVYGTRKYSNTAQWRIPVGLCFLWALIIIVGMLLVPESPRYLIECERHEEACVSIAKIDKVSPEDPWVLKQADEINAGVLAQRELGEASWKELFSVKTKVLQRLITGILVQTFLQLTGENYFFFYGTTIFKSVGLTDGFETSIVLGTVNFFSTIIAVMVVDKIGRRKCLLFGAASMMACMVIFASIGVKCLYPHGQDGPSSKGAGNAMIVFTCFYIFCFATTWAPVAYIVVAESFPSKVKSKAMSISTAFNWLWQFLIGFFTPFITGSIHFYYGYVFVGCLVAMFLYVFFFLPETIGLSLEETQLLYEEGIKPWKSASWVPPSRRGASSRETEAKKKSWKEVLKFPKSFN

SEQ ID NO: 23616 - protein, 592 aa, Saccharomyces cerevisiae
MSELENAHQGPLEGSATVSTNSNSYNEKSGNSTAPGTAGYNDNLAQAKPVSSYISHEGPPKDELEELQKEVDKQLEKKSKSDLLFVSVCCLMVAFGGFVFGWDTGTISGFVRQTDFIRRFGSTRANGTTYLSDVRTGLMVSIFNIGCAIGGIVLSKLGDMYGRKIGLMTVVVIYSIGIIIQIASIDKWYQYFIGRIISGLGVGGITVLAPMLISEVSPKQLRGTLVSCYQLMITFGIFLGYCTNFGTKNYSNSVQWRVPLGLCFAWSIFMIVGMTFVPESPRYLVEVGKIEEAKRSLARANKTTEDSPLVTLEMENYQSSIEAERLAGSASWGELVTGKPQMFRRTLMGMMIQSLQQLTGDNYFFYYGTTIFQAVGLEDSFETAIVLGVVNFVSTFFSLYTVDRFGRRNCLLWGCVGMICCYVVYASVGVTRLWPNGQDQPSSKGAGNCMIVFACFYIFCFATTWAPVAYVLISESYPLRVRGKAMSIASACNWIWGFLISFFTPFITSAINFYYGYVFMGCMVFAYFYVFFFVPETKGLTLEEVNEMYEENVLPWKSTKWIPPSRRTTDYDLDATRNDPRPFYKRMFTKEK

SEQ ID NO: 23617 - protein, 546 aa, Saccharomyces cerevisiae
MVSSSVSILGTSAKASTSLSRKDEIKLTPETREASLDIPYKPIIAYWTVMGLCLMIAFGGFIFGWDTGTISGFINQTDFKRRFGELQRDGSFQLSDVRTGLIVGIFNIGCALGGLTLGRLGDIYGRKIGLMCVILVYVVGIVIQIASSDKWYQYFIGRIVSGMGVGGVAVLSPTLISEISPKHLRGTCVSFYQLMITLGIFLGYCTNYGTKKYSNSIQWRVPLGLCFAWAIFMVIGMVMVPESPRYLVEKGKYEEARRSLAKSNKVTVTDPGVVFEFDTIVANMELERAVGNASWHELFSNKGAILPRVIMGIVIQSLQQLTGCNYFFYYGTTIFNAVGMQDSFETSIVLGAVNFASTFVALYIVDKFGRRKCLLWGSASMAICFVIFATVGVTRLWPQGKDQPSSQSAGNVMIVFTCFFIFSFAITWAPIAYVIVAETYPLRVKNRAMAIAVGANWMWGFLIGFFTPFITRSIGFSYGYVFMGCLIFSYFYVFFFVCETKGLTLEEVNEMYEERIKPWKSGGWIPSSRRTPQPTSSTPLVIVDSK

SEQ ID NO: 23618 - protein, 560 aa, Saccharomyces cerevisiae
MSEEAAYQEDTAVQNTPADALSPVESDSNSALSTPSNKAERDDMKDFDENHEESNNYVEIPKKPASAYVTVSICCLMVAFGGFVFGWDTGTISGFVAQTDFIRRFGMKHHDGTYYLSKVRTGLIVSIFNIGCAIGGIILAKLGDMYGRKMGLIVVVVIYIIGIIIQIASINKWYQYFIGRIISGLGVGGIAVLSPMLISEVSPKHIRGTLVSCYQLMITLGIFLGYCTNYGTKTYTNSVQWRVPLGLGFAWALFMIGGMTFVPESPRYLVEVGKIEEAKRSIALSNKVSADDPAVMAEVEVVQATVEAEKLAGNASWGEIFSTKTKVFQRLIMGAMIQSLQQLTGDNYFFYYGTTVFTAVGLEDSFETSIVLGIVNFASTFVGIFLVERYGRRRCLLWGAASMTACMVVFASVGVTRLWPNGKKNGSSKGAGNCMIVFTCFYLFCFATTWAPIPFVVNSETFPLRVKSKCMAIAQACNWIWGFLIGFFTPFISGAIDFYYGYVFMGCLVFSYFYVFFFVPETKGLTLEEVNTLWEEGVLPWKSPSWFHQTREVLTTTLMI

SEQ ID NO: 23619 - protein, 576 aa, Saccharomyces cerevisiae
MSEEAAYQEDTAVQNTPADALSPVESDSNSALSTPSNKAERDDMKDFDENHEESNNYVEIPKKPASAYVTVSICCLMVAFGGFVFGWDTGTISGFVAQTDFIRRFGMKHHDGTYYLSKVRTGLIVSIFNIGCAIGGIILAKLGDMYGRKMGLIVVVVIYIIGIIIQIASINKWYQYFIGRIISGLGVGGIAVLSPMLISEVSPKHIRGTLVSCYQLMITLGIFLGYCTNYGTKTYTNSVQWRVPLGLGFAWALFMIGGMTFVPESPRYLVEVGKIEEAKRSIALSNKVSADDPAVMAEVEVVQATVEAEKLAGNASWGEIFSTKTKVFQRLIMGAMIQSLQQLTGDNYFFYYGTTVFTAVGLEDSFETSIVLGIVNFASTFVGIFLVERYGRRRCLLWGAASMTACMVVFASVGVTRLWPNGKKNGSSKGAGNCMIVFTCFYLFCFATTWAPIPFVVNSETFPLRVKSKCMAIAQACNWIWGFLIGFFTPFISGAIDFYYGYVFMGCLVFSYFYVFFFVPETKGLTLEEVNTLWEEGVLPWKSPSWVPPNKRGTDYNADDLMHDDQPFYKKMFGKK

SEQ ID NO: 23620 - protein, 570 aa, Saccharomyces cerevisiae
MSQDAAIAEQTPVEHLSAVDSASHSVLSTPSNKAERDEIKAYGEGEEHEPVVEIPKRPASAYVTVSIMCIMIAFGGFVFGWDTGTISGFINQTDFIRRFGMKHKDGTNYLSKVRTGLIVSIFNIGCAIGGIILSKLGDMYGRKVGLIVVVVIYIIGIIIQIASINKWYQYFIGRIISGLGVGGIAVLSPMLISEVSPKHLRGTLVSCYQLMITAGIFLGYCTNFGTKNYSNSVQWRVPLGLCFAWALFMIGGMTFVPESPRYLAEVGKIEEAKRSIAVSNKVAVDDPSVLAEIEAVLAGVEAEKLAGNASWGELFSSKTKVLQRLIMGAMIQSLQQLTGDNYFFYYGTTIFKAVGLSDSFETSIVLGIVNFASTFVGIYVVERYGRRTCLLWGAASMTACMVVYASVGVTRLWPNGQDQPSSKGAGNCMIVFACFYIFCFATTWAPIPYVVVSETFPLRVKSKAMSIATAANWLWGFLIGFFTPFITGAINFYYGYVFMGCLVFMFFYVLLVVPETKGLTLEEVNTMWEEGVLPWKSASWVPPSRRGANYDAEEMAHDDKPLYKRMFSTK

SEQ ID NO: 23621 - protein, 570 aa, Saccharomyces cerevisiae
MSQDAAIAEQTPVEHLSAVDSASHSVLSTPSNKAERDEIKAYGEGEEHEPVVEIPKRPASAYVTVSIMCIMIAFGGFVFGWDTGTISGFINQTDFIRRFGMKHKDGTNYLSKVRTGLIVSIFNIGCAIGGIILSKLGDMYGRKVGLIVVVVIYIIGIIIQIASINKWYQYFIGRIISGLGVGGIAVLSPMLISEVSPKHLRGTLVSCYQLMITAGIFLGYCTNFGTKNYSNSVQWRVPLGLCFAWALFMIGGMTFVPESPRYLAEVGKIEEAKRSIAVSNKVAVDDPSVLAEVEAVLAGVEAEKLAGNASWGELFSSKTKVLQRLIMGAMIQSLQQLTGDNYFFYYGTTIFKAVGLSDSFETSIVLGIVNFASTFVGIYVVERYGRRTCLLWGAASMTACMVVYASVGVTRLWPNGQDQPSSKGAGNCMIVFACFYIFCFATTWAPIPYVVVSETFPLRVKSKAMSIATAANWLWGFLIGFFTPFITGAINFYYGYVFMGCLVFMFFYVLLVVPETKGLTLEEVNTMWEEGVLPWKSASWVPPSRRGANYDAEEMTHDDKPLYKRMFSTK

SEQ ID NO: 23622 - protein, 570 aa, Saccharomyces cerevisiae
MSQDAAIAEQTPVEHLSAVDSASHSVLSTPSNKAERDEIKAYGEGEEHEPVVEIPKRPASAYVTVSIMCIMIAFGGFVFGWDTGTISGFINQTDFIRRFGMKHKDGTNYLSKVRTGLIVSIFNIGCAIGGIILSKLGDMYGRKVGLIVVVVIYIIGIIIQIASINKWYQYFIGRIISGLGVGGIAVLSPMLISEVSPKHLRGTLVSCYQLMITAGIFLGYCTNFGTKNYSNSVQWRVPLGLCFAWALFMIGGMTFVPESPRYLAEVGKIEEAKRSIAVSNKVAVDDPSVLAEVEAVLAGVEAEKLAGNASWGELFSSKTKVLQRLIMGAMIQSLQQLTGDNYFFYYGTTIFKAVGLSDSFETSIVLGIVNFASTFVGIYVVERYGRRTCLLWGAASMTACMVVYASVGVTRLWPNGQDQPSSKGAGNCMIVFACFYIFCFATTWAPIPYVVVSETFPLRVKSKAMSIATAANWLWGFLIGFFTPFITGAINFYYGYVFMGCLVFMFFYVLLVVPETKGLTLEEVNTMWEEGVLPWKSASWVPPSRRGANYDAEEMAHDDKPLYKRMFSTK

SEQ ID NO: 23623 - protein, 541 aa, Saccharomyces cerevisiae
MSEFATSRVESGSQQTSIHSTPIVQKLETDESPIQTKSEYTNAELPAKPIAAYWTVICLCLMIAFGGFVFGWDTGTISGFVNQTDFKRRFGQMKSDGTYYLSDVRTGLIVGIFNIGCAFGGLTLGRLGDMYGRRIGLMCVVLVYIVGIVIQIASSDKWYQYFIGRIISGMGVGGIAVLSPTLISETAPKHIRGTCVSFYQLMITLGIFLGYCTNYGTKDYSNSVQWRVPLGLNFAFAIFMIAGMLMVPESPRFLVEKGRYEDAKRSLAKSNKVTIEDPSIVAEMDTIMANVETERLAGNASWGELFSNKGAILPRVIMGIMIQSLQQLTGNNYFFYYGTTIFNAVGMKDSFQTSIVLGIVNFASTFVALYTVDKFGRRKCLLGGSASMAICFVIFSTVGVTSLYPNGKDQPSSKAAGNVMIVFTCLFIFFFAISWAPIAYVIVAESYPLRVKNRAMAIAVGANWIWGFLIGFFTPFITSAIGFSYGYVFMGCLVFSFFYVFFFVCETKGLTLEEVNEMYVEGVKPWKSGSWISKEKRVSEE

SEQ ID NO: 23624 - protein, 532 aa, Aspergillus oryzae
MVAGGGVVSSSGMDAYRALPNNTNSNWFKDKGLRRLNFGLMLMFASAAANGYDGALMNGLLTLPMCKFPLSSCPHLWRMFTFIPASYFADYFGRKMSVALGSAIMIVASVIQAATVGRWAFFGTRIAMGIGLGFAQTAAPPLTTEIAHPRHRGVVTAIFQATWYWGAILAAAVCLGTFYVEGSTWSWRIPCLLQCFFPAVQLVGLLIVPESPRWLVSKDRRDEALQILARYHGNCDTSDPLVQFEFSEICSAIELENSVAHKSGWSAFIATKGARHRLAICLLVGVMIQWAGNGTYRAIHLLLSILLIILSLGVISYYLAPILRSVGITNPTQQSAINLGLQAWNAVCAAGGAVAAEKYGRRPLWMLSTVLMLLFFTLATVLSAVFDESAIKAAGSAVVAFLYLFYGAYDIAYTPLSIAYPVEIMPFYLRTKGLSLSLTAQFGAGFFNQFVNPIALGAIKWKFYFVYLGLLVIFLGIIYFVFPETKGHTLEEIAVIFDGPGAETEVQRDLAAIIAVEREVKAPMKEELEHAP

SEQ ID NO: 23625 - protein, 531 aa, Aspergillus parasiticus
MAVLHSGVVCLDGWFYLRLLHRYVNFPVGYLPCFVLTFTSGQIAGFTTMNDFKMRFAEQHADGTYAFSNVRNGLIVGLLSIGTMIGALVAAPIADRIGRKYSISFWSVIHMVGIIIQIATDDNWVQVAMGRWVAGLVVGALSSIVPMYQSESAPRQVRGAMVSAFQLFVASVFSSLISSTSVPNPSTVPLPGVSLWDMCAWPLILGVGTLFLPESPRYAYRNGRVEEAREVMCKLYGVGPNHRCIAQEMKDMKDKLDEEKAAGQAWHFEVFTGPRMFYRVAGIALQSLQQLTGANFLFYYGNTIFTSTGLNNSYVTQIILGAVNFGMTLPGLYVVEHFGRRNSLMVGASWMFICFMIWASIGHFALDLENPPNTPQAGTAMIVFTCFFIGGFATTWGPIVWAICGEMYPARYRAVCIGLATAANWSLNFLISFFNPIHLQRYRLCYGYVFAGCCFAAVLVVFFFVNETQGRTLEEVDTMYVLHVKPWKSASWTPRRVSSVISTDPPLPPSRRVGLSTASPPPRSASKWYHV

SEQ ID NO: 23626 - protein, 513 aa, Aspergillus parasiticus
MVAGGGIVSSSGMDAYRALPNNTNSNWFKDKGLRRLNFGLMLMFASAAANGYDGALMNGLLTLPMCEFPLSSCPHLWRMFTFIPASYFADYFGRKMSVALGSAIMIVASVIQAATVGRWAFFGTRIAMGIGLGFAQTAAPPLTTEIAHPRHRGVVTAIFQATWYWGAILAAAVCLATLYVEGSTWSWRIPCLVQCFFPAVQLLGLLIVPESPRWLVSKDRRDEALQILARYHGNCDTSDPLVQFEFSEICSAIELENSVAHKSGWSAFIATKGARHRLAICLLVGVMIQWAGNGVISYYLAPILRSVGITNPTQQSAINLGLQAWNAVCAAGGAVAAEKYGRRPLWMLSTVLMLLFFTLATVLSAVFDESAIKAAGSAVVAFLYLFYGAYDIAYTPLSIAYPVEIMPFYLRTKGLSLSLTAQFGAGFFNQFVNPIALGAIKWKFYFVYLGLLVIFLGIVYFVFPETKGHTLEEIAVIFDGPGAETEVQRDLAAIIAVEREVKAPMKEELEHAP

SEQ ID NO: 23627 - protein, 489 aa, Citrus unshiu
MWGRQREASMMYKRTSSRDRSSTFDVEETTALVQNGTEVENTNPSWKLSFPHVLVATLSSFLFGYHLGVVNEPLESISLDLGFNGNTLAEGLVVSMCLGGAFIGSTLSGWIADGVGRRRAFQLCALPMIIGASISATTRNLIGMLLGRFVVGTGMGLGPTVAALYVTEVSPPFVRGTYGAFIQIATCLGLMGSLLIGIPVKEIAGWWRICFWVSIVPAAILCLAMVFCAESPHWLYKKGRTAEAEAEFEKLLGGSHVKSSLAELSKLDRGDDGDIVKFEELLYGRHFRVVFIGSTLFALQQLSGINAIFYFSSSVFKSAGLSSGLANVFVGIANLLGSVVAMVLMDKLGRKALLQWSFFSMAVSMAIQVAASSSYIPGSASLYLSVGGMLMFVLTFALGAGPVPSLLLPEIFPSRIRAKAMAVCMSVHWVINFFVGLLFLRLLEQLGPQLLYSIFGTFCLMAVAFVKRNVVETKGKSLQEIEIALLPQE

SEQ ID NO: 23628 - protein, 445 aa, Escherichia coli
MNTSPVRMDDLPLNRFHCRIAALTFGAHLTDGYVLGVIGYAIIQLTPAMQLTPFMAGMIGGSALLGLFLGSLVLGWISDHIGRQKIFTFSFLLITLASFLQFFATTPEHLIGLRILIGIGLGGDYSVGHTLLAEFSPRRHRGILLGAFSVVWTVGYVLASIAGHHFISENPEAWRWLLASAALPALLITLLRWGTPESPRWLLRQGRFAEAHAIVHRYFGPHVLLGDEVVTATHKHIKTLFSSRYWRRTAFNSVFFVCLVIPWFVIYTWLPTIAQTIGLEDALTASLMLNALLIVGALLGLVLTHLLAHRKFLLGSFLLLAATLVVMACLPSGSSLTLLLFVLFSTTISAVSNLVGILPAESFPTDIRSLGVGFATAMSRLGAAVSTGLLPWVLAQWGMQVTLLLLATVLLVGFVVTWLWAPETKALPLVAAGNVGGANEHSVSV

SEQ ID NO: 23629 - protein, 558 aa, Leishmania donovani
MTLKKRSSAPELPTSLDEDEEEDSPQPLSNTPFFSMKNLIVATPIILTPLLYGYNLGFVGPYSTMYGYASNCQLYSAKKSCETLTAAKCRWFNASTYVSNTTYGEVCGWADRTTCFLKYSDEAGCLSDSACKWSYSANTCGNQVGYSSIQSGVFAGSLVIGSTMGALMGGYLTKRLDYCKSFLFIGLLSVIGNVLTHVATGLFHYWVLFVARIVLGFPLGWQSITSSHYTDKFAPANHAKTLGTLFQVSVSTGIFVTSFFGLVLGNTIQYDAASNANTMGRMQGLVSVSTLLSIFVVFLPLITKDGYSKSRRGDYEGENSEDASRKAAEEYTMTQMIGPILNGVAMGCVTQLTGINANMNFAPTIMSNLGLQPLVGNIIVMAWNMLATFCVIPLSRRFSMRTLFLFCGFVGSLCCVFLGGIPVYPGVTKSDKAISGIAITGIAIFIALYEMGVGPCFYVLAVDVFPESFRPIGSSITVGVMFIFNLIINICYPIATEGISGGPSGNPNKGQAVAFIFFGCIGVVACVIEYFFLQPWVEPEAKMTDDLDGAAVPEGKHD

SEQ ID NO: 23630 - protein, 627 aa, Leishmania donovani
MGSPNDKEEEGTREPFHSLEVRGQVPAASALTSMISTNMSPKEQLSNGKSITQANADLPLISAAADSPSMTLKKRSSAPELPTSLDEDEEEDSPQPLSNTPFFSMKNLIVATPIILTPLLYGYNLGFVGPYSTMYGYASNCQLYSAKKSCETLTAAKCRWFNASTYVSNTTYGEVCGWADRTTCFLKYSDEAGCLSDSACKWSYSANTCGNQVGYSSIQSGVFAGSLVIGSTMGALMGGYLTKRLDYCKSFLFIGLLSVIGNVLTHVATGLFHYWVLFVARIVLGFPLGWQSITSSHYTDKFAPANHAKTLGTLFQVSVSTGIFVTSFFGLVLGNTIQYDAASNANTMGRMQGLVSVSTLLSIFVVFLPLITKDGYSKSRRGDYEGENSEDASRKAAEEYTMTQMIGPILNGVAMGCVTQLTGINANMNFAPTIMSNLGLQPLVGNIIVMAWNMLATFCVIPLSRRFSMRTLFLFCGFVGSLCCVFLGGIPVYPGVTKSDKAISGIAITGIAIFIALYEMGVGPCFYVLAVDVFPESFRPIGSSITVGVMFIFNLIINICYPIATEGISGGPSGNPNKGQAVAFIFFGCIGVVACVIEYFFLQPWVEPEAKMTDDLDGAAVPEGKHD

SEQ ID NO: 23631 - protein, 472 aa, Klebsiella oxytoca
MTTLSHDSTTMPRTQRDTRRMNQFVSIAAAVAGLLFGLDIGVIAGALPFITDHFVLSSRLQEWVVSSMMLGAAIGALFNGWLSFRLGRKYSLMVGAVLFVAGSVGSAFATSVEMLLVARIVLGVAVGIASYTAPLYLSEMASENVRGKMISMYQLMVTLGIVMAFLSDTAFSYSGNWRAMLGVLALPAVVLIILVIFLPNSPRWLAEKGRHVEAEEVLRMLRDTSEKARDELNEIRESLKLKQGGWALFKVNRNVRRAVFLGMLLQAMQQFTGMNIIMYYAPRIFKMAGFTTTEQQMVATLVVGLTFMFATFIAVFTVDKAGRKPALKIGFSVMAIGTLVLGYCLMQFDNGTASSGLSWLSVGMTMMCIAGYAMSAAPVVWILCSEIQPLKCRDFGITCSTTTNWVSNMIIGATFLTLLDAIGAAGTFWLYTALNVAFIGVTFWLIPETKNVTLEHIERRLMSGEKLRNIGN

SEQ ID NO: 23632 - protein, 492 aa, Schistosoma mansoni
MRQLKFFLPYCIITLGSSFPFGYHTGVINAPADLIKSFINTTLAARSVTCDERFIDLLWSLCVTSFLLGGFFGGLIGGVLANKLGRKNSLFLLSIPTVIGSLLMMFSKMAQSFEMIIIGRFTIGIACGAHTVVGPMFLSEIAPVNFRGAAGTFNQFVIVSAILLSQVLSLPEVMGTTELWPYLLALCTVSSVIHILLLFTCPESPTYLYIIKGDRRRSENALVYLRGQDCDVHAELELLKLETEQSSTHKSNVCDLLRIPYLRWGLIVALVPHIGQQFSGINGILYYFVSLFISNGLTKQVASYANLGTGVTILIGAFASIFVIDRKGRRPLLMFGTSVCLFSLLLFTLTLIIKQVTEINKLTILSIVLTYTFLFGFSVSLGSIPWFLVSELFTQENRDAAVSIAAATNWLCNAIVALIFPQLVIYIGIYAFIPFICALLVVLIFVGLYLPETKGKTPASIEDYFMRVCGFRGTEAHENPTFTDIIDDTTQY

SEQ ID NO: 23633 - protein, 489 aa, Schistosoma mansoni
MRQLKFFLPYCIITLGSSFPFGYHTGVINAPADLIKSFINTTLAARSVTCDERFIDLLWSLCVTSFLLGGFFGGLIGGVLANKLGRKNSLFLLSIPTVIGSLLMMFSKMAQSFEMIIIGRFTIGIACGAHTVVGPMFLSEIAPVNFRGAAGTFNQFVIVSAILLSQVLSLPEVMGTTELWPYLLALCTVSSVIHILLLFTCPESPTYLYIIKGDRRRSENALVYLRGQDCDVHAELELLKLETEQSSTHKSNVCDLLRIPYLRWGLIVALVPHIGQQFSGINGILYYFVSLFISNGLTKQVASYANLGTGVTILIGAFASIFVIDRKGRRPLLMFGTSVCLFSLLLFTLTLIIKQVTEINKLTILSIVLTYTFLFGFSVSIPWFLVSELFTQENRDAAVSIAAATNWLCNAIVALIFPQLVIYIGIYAFIPFICALLVVLIFVGLYLPETKGKTPASIEDYFMRVCGFRGTEAHENPTFTDIIDDTTQY

SEQ ID NO: 23634 - protein, 492 aa, Bos taurus
MEPTSKKLTGRLMLAVGGAVLGSLQFGYNTGVINAPQKVIEEFYNQTWVQRYGEPIPPATLTTLWSLSVAIFSVGGMIGSFSVGLFVNRFGRRNSMLMMNLLAFVSAVLMGFSKLGKSFEMLILGRFIIGVYCGLTTGFVPMYVGEVSPTELRGALGTLHQLGIVVGILIAQVFGLDSIMGNQELWPLLLSVIFIPALLQCILLPFCPESPRFLLINRNEENRAKSVLKKLRGTADVTRDLQEMKEESRQMMREKKVTILELFRSAAYRQPILIAVVLQLSQQLSGINAVFYYSTSIFEKAGVQQPVYATIGSGIVNTAFTVVSLFVVERAGRRTLHLIGLAGMAGCAVLMTIALALLERLPWMSYLSIVAIFGFVAFFEVGPGPIPWFIVAELFSQGPRPAAIAVAGFSNWTSNFIVGMCFQYVEQLCGPYVFIIFTVLLVLFFIFTYFKVPETKGRTFDEIASGFRQGGASQSDKTPEELFHPLGADSQV

SEQ ID NO: 23635 - protein, 509 aa, Bos taurus
MPSGFQQIGSEDGEPPRQRVTGTLVLGVFSAVLGSLQFGYNIGVINAPQKVIEQSYNETWLGRQGPEGPGSIPPGTLTTLWALSVAIFSVGGMISSFLIGIISQWLGRKRAMLFSNALAVLGGTLMGLAKAAASYEMLILGRFFIGAYSGLTSGLVPMYVGEIAPTHLRGALGTLNQLAIVTGILIAQVLGLESMLGTATLWPLLLGITVLPALLQMVLLPLCPESPRYLYIIRNLEGPARKSLKRLTGWADVSEVLAELKEEKRKLERERSLSLLQLLGSHTHRQPLVIAIVLQLSQQLSGINAVFYYSTSIFESAGVEKPAYATIGAGVVNTVFTLVSVFLVERAGHRTLHLLGLAGMCACAILMTVALLLLERVPAMSYVSIVAIFGFVAFFEIGPGPIPCFIVAELFSQGPRPAAMAVAGFSNWTCNFIIGMGFQYVADAMGPYVFLLFAVLLLGFFIFTFLKVPETRGRTFDQISAVFHRTPSLLEQEVKPSTELEYLGPDEHD

SEQ ID NO: 23636 - protein, 509 aa, Bos taurus
MPSGFQQIGSEDGEPPRQRVTGTLVLGVFSAVLGSLQFGYNIGVINAPQKVIEQSYNETWLGRQGPEGPGSIPPGTLTTLWALSVAIFSVGGMISSFLIGIISQWLGRKRAMLFNNALAVLGGTLMGLAKAAASYEMLILGRFFIGAYSGLTSGLVPMYVGEIAPTHLRGALGTLNQLAIVTGILIAQVLGLESMLGTATLWPLLLGITVLPALLQMVLLPLCPESPRYLYIIRNLEGPARKSLKRLTGWADVSEVLAELKEEKRKLERERSLSLLQLLGSHTHRQPLVIAIVLQLSQQLSGINAVFYYSTSIFESAGVEKPAYATIGAGVVNTVFTLVSVFLVERAGHRTLHLLGLAGMCACAILMTVALLLLERVPAMSYVSIVAIFGFVAFFEIGPGPIPCFIVAELFSQGPRPAAMAVAGFSNWTCNFIIGMGFQYVADAMGPYVFLLFAVLLLGFFIFTFLKVPETRGRTFDQISAVFHRTPSLLEQEVKPSTELEYLGPDEHD

SEQ ID NO: 23637 - protein, 477 aa, Salmonella typhimurium LT2
MSTSDSCYNTGYILRICAIAALGGILFGYDTAVISGAIGSLTSYFHLSPAETGWAVSCVVVGCVIGSFSAGYLSKRFGRKKSLMVSALLFTISAVGTSLSYTFTHFVIYRIIGGLAVGLAATVSPMYMSEVSPKNMRGRALSMQQFAIVFGQILIFYVNYKIASIAADTWLIELGWRYMFAAGIIPCILFCILVFLIPESPRWMMMIGREEETLKILTKISNEEHARHLLADIKTSLQNDQLNAHQKLNYRDGNVRFILILGCMIAMLQQVTGVNVMMYYAPIVLKDVTGSAQEALFQTIWIGVIQLIGSIIGAMIMDKMGRLSLMRKGTIGSIIGLLLTSWALYSQATGYFALFGMLFFMIFYALSWGVGAWVLISEIFPNRMRSQGMSISVGFMWMANFLVSQFFPMINENPYLLSHFHGAFPMWIFAICCIFSYFFICRYLPETKGISLEKMESVVLAKRRKKLQPIQTERYSD

SEQ ID NO: 23638 - protein, 478 aa, Salmonella typhimurium LT2
MSQRSKYNSAYVYVLCCIAALAGLMFGYSTAVITGVVLPLQQYYQLTPTETGWAVSSIVIGCIIGALVGGKIADKLGRKPALLIIAIIFIASSLGAAMSESFMIFSLSRIVCGFAVGMAGTASTMYMSELAPAEIRGKALGIYNISVVSGQVIVFIVNYLIAKGMPADVLVSQGWKTMLFAQVVPSIAMLAITLFLPESPAWCARNNRSEARSIKVLTRIYSGLTATDVAAIFDSMKETVRSQDNVAGGERTNLKSSPVLRYILLVGCCIAVLQQFTGVNVMNYYAPLVLQNSSTEVVMFQTIFIAVCNVVGSFIGMILFDRYGRIPIMKIGTIGSIVGLLIASYGLYTHDTGYITIFGILFFMLLFAVSWSVGAWVLISEVFPEKIKGFGMGLAVSLMWIANFLISLLFPVINDNAWLQETFGGAFSMWIFVVFNLVCYVFISRYVPETKGVPLTEIERLAENKLREIQGKRRDVIA

SEQ ID NO: 23639 - protein, 494 aa, Ovis aries
MGTTKVTTPLIFAISIATIGSFQFGYNTGVINAPEAIIKDFLNYTLEERSETPPSSVLLTSLWSLSVAIFSVGGMIGSFSVGLFVNRFGRRNSMLIVNLLAIAGGCLMGFCKIAESVEMLILGRLIIGLFCGLCTGFVPMYIGEISPTALRGAFGTLNQLGIVIGILVAQIFGLKVILGTEDLWPLLLGFTILPAIIQCAALPFCPESPRFLLINRKEEEKAKEILQRLWGTEDVAQDIQEMKDESMRMSQEKQVTVLELFRAPNYRQPIIISIMLQLSQQLSGINAVFYYSTGIFKDAGVQEPVYATIGAGVVNTIFTVVSVFLVERAGRRTLHLIGLGGMAFCSILMTISLLLKDNYSWMSFICIGAILVFVAFFEIGPGPIPWFIVAELFGQGPRPAAMAVAGCSNWTSNFLVGLLFPSATFYLGAYVFIVFTVFLVIFWVFTFFKVPETRGRTFEEITRAFEGQVQTGTRGEKGPIMEMNSIQPTKDTNA

SEQ ID NO: 23640 - protein, 390 aa, Ovis aries
AFVSAVLMGFSKLGKSFEMLILGRFIIGVYCGLTTGFVPMYVGEVSPTELRGALGTLHQLGIVVGILIAQVFGLDSIMGNQELWPLLLSVIFIPALLQCILLPFCPESPRFLLINRNEENRAKSVLKKLRGTADVTRDLQEMKEESRQMMREKKVTILELFRSAAYRQPILIAVVLQLSQQLSGINAVFYYSTSIFEKAGVQQPVYATIGSGIVNTAFTVVSLFVVERAGRRTLHLIGLAGMAGCAVLMTIALALLEQLPWMSYLSIVAIFGFVAFFEVGPGPIPWFIVAELFSQGPRPAAIAVAGFSNWTSNFIVGMCFQYVEQLCGPYVFIIFTVLLVLFFIFTYFKVPETKGRTFDEIASGFRQGGASQSDKTPEELFHPLGADSQV

SEQ ID NO: 23641 - protein, 492 aa, Oryctolagus cuniculus
MEPSSKKVTGRLMLAVGGAVLGSLQFGYNTGVINAPQKVIEEFYNQTWIHRYGERILPTTLTTLWSLSVAIFSVGGMIGSFSVGLFVNRFGRRNSMLMMNLLAFVSAVLMGFSKLAKSFEMLILGRFIIGVYCGLTTGFVPMYVGEVSPTALRGALGTLHQLGIVVGILIAQVFGLDSIMGNEDLWPLLLSVIFVPALLQCIVLPLCPESPRFLLINRNEENRAKSVLKKLRGNADVTRDLQEMKEESRQMMREKKVTILELFRSPAYRQPILSAVVLQLSQQLSGINAVFYYSTSIFEKAGVQQPVYATIGSGIVNTAFTVVSLFVVERAGRRTLHLIGLAGMAACAVLMTIALALLEQLPWMSYLSIVAIFGFVAFFEVGPGPIPWFIVAELFSQGPRPAAVAVAGFSNWTSNFIVGMCFQYVEQLCGPYVFIIFTVLLVLFFIFTYFKVPETKGRTFDEIASGFRQGGASQSDKTPEELFHPLGADSQV

SEQ ID NO: 23642 - protein, 400 aa, Oryctolagus cuniculus
  unsure (1)..(400): unsure at all Xaa locations
NLLAIIAGCLMGFAKIAESVEMLILGRLLIGIFCGLCTGFVPMYIGEVSPTALRGAFGTLNQLGIVIGILVAQIFGLEIILGSEVLWPVLLGFTIIPAILQSAALPFCPESPRFLLINKEEDEAKQILQILQRLWGTQDVAQDIQEMKEESARMRQEKQVTVLELFRAPSYRQPIIISIVLQLSQQLSGINAVFYYSTGIFKDAGVREPIYATIGAGVVNTIFTIVSVFLVERAGRRTLHLIGLGGMALCSVLMTVSLLLKXKYDTMSLVCIAAILIYAAFFEIGPGPIPWLIVTGLFSQDPRPAAMAVAGCSNWTSNFLVGLLFPSAAYYLGAYVFVIFAVFLVAFFIFTFFKVPETRGRTFEDITRAFEGQAAEANKLGKGPTMEMNSIQPIETTTHV

SEQ ID NO: 23643 - protein, 487 aa, Oryctolagus cuniculus
MEQEGQEKKKEGRLTLVLALRTLIAAFGSSFQYAYNVSVCNSPSELMTEFYNDTYYDRTGELIDEFPLTLLWSVTVSMFPSGGFAGSLLVGPLVNKFGRKGALLFNNIFSIVPAILMGCSKVARSFELIIISRLLVGICAGVSSNVVPMYLGELAPKNLRGALGVESQLFITLGILVAQIFGLRSIRQQKGWPILLGLTGGPAAAACPPFFPESPRYLLIGQEPRCRQKALQSLRGWDSVDRELEEIRREDEAARAAGLVSVRALCAMRGLAWQLISVVPLMWQQLSGVNAIYYYDQIYLSPLDTDTQYYTAATGAVNVLMTVCTVFVVESWARLLLLLGFSPLAPTCCVLTAALALQDTVSWMPYISIVCIIVYVIGHAIGPAIRSLYTEIFLQSGRPPTWWGQVHWLSNFTVGLVFPLIQWALGLYSFIIFGVACLSTTVYTFLIVPETKGKSFIEIIRRFIRMNKVEVSPDREELKDFPPDVSE

SEQ ID NO: 23644 - protein, 486 aa, Oryctolagus cuniculus
MEQEGQEKKKEGRLTLVLALRTLIAAFGSSFQYAYNVSVCNSPSELMTEFYNDTYYDRTGELIDEFPLTLLWSVTVSMFPSGGFAGSLLVGPLVNKFGRKGALLFNNIFSIVPAILMGCSKVARSFELIIISRLLVGICAGVSSNVVPMYLGELAPKNLRGALGVESQLFITLGILVAQIFGLRSIRQQKGWPILLGLTGGPAAAACPPFFPESPRYLLIGQEPRCRQKALQSLRGWDSVDRELEEIRREDEAARAAGLVSVRALCAMRGLAWQLISVVPLMWQQLSGVNAIYYYDQIYLSPLDTDTQYYTAATGAVNVLMTVCTVFVVESWARLLLLLGFSPLAPTCCVLTAALALQDTVSWMPYISIVCIIVYVIGHAIGPAIRSLYTEIFLQSGRPPTWWGQVHWLSNFTVGLVFPLIQWAGLYSFIIFGVACLSTTVYTFLIVPETKGKSFIEIIRRFIRMNKVEVSPDREELKDFPPDVSE

SEQ ID NO: 23645 - protein, 477 aa, Mus musculus
MSPEDPQETQPLLRPPEARTPRGRRVFLASFAAALGPLSFGFALGYSSPAIPSLRRTAPPALRLGDNAASWFGAVVTLGAAAGGILGGWLLDRAGRKLSLLLCTVPFVTGFAVITAARDVWMLLGGRLLTGLACGVASLVAPVYISEIAYPAVRGLLGSCVQLMVVTGILLAYVAGWVLEWRWLAVLGCVPPTLMLLLMCYMPETPRFLLTQHQYQEAMAALRFLWGSEEGWEEPPVGAEHQGFQLALLRRPGIYKPLIIGISLMVFQQLSGVNAIMFYANSIFEEAKFKDSSLASVTVGIIQVLFTAVAALIMDRAGRRLLLALSGVIMVFSMSAFGTYFKLTQSLPSNSSHVGLVPIAAEPVDVQVGLAWLAVGSMCLFIAGFAVGWGPIPWLLMSEIFPLHVKGVATGICVLTNWFMAFLVTKEFSSVMEMLRPYGAFWLTAAFCALSVLFTLTVVPETKGRTLEQVTAHFEGR

SEQ ID NO: 23646 - protein, 477 aa, Mus musculus
MSPEDPQETQPLLRPPEARTPRGRRVFLASFAAALGPLSFGFALGYSSPAIPSLRRTAPPALRLGDNAASWFGAVVTLGAAAGGILGGWLLDRSGRKLSLLLCTVPFVTGFAVITAARDVWMLLGGRLLTGLACGVASLVAPVYISEIAYPAVRGLLGSCVQLMVVTGILLAYVAGWVLEWRWLAVLGCVPPTLMLLLMCYMPETPRFLLTQHQYQEAMAALRFLWGSEEGWEEPPVGAEHQGFQLALLRRPGIYKPLIIGISLMVFQQLSGVNAIMFYANSIFEEAKFKDSSLASVTVGIIQVLFTAVAALIMDRAGRRLLLALSGVIMVFSMSAFGTYFKLTQSLPSNSSHVGLVPIAAEPVDVQVGLAWLAVGSMCLFIAGFAVGWGPIPWLLMSEIFPLHVKGVATGICVLTNWFMAFLVTKEFSSVMEMLRPYGAFWLTAAFCALSVLFTLTVVPETKGRTLEQVTAHFEGR

SEQ ID NO: 23647 - protein, 477 aa, Mus musculus
MSPEDPQETQPLLRPPEARTPRGRRVFLASFAAALGPLNFGFALGYSSPAIPSLRRTAPPALRLGDNAASWFGAVVTLGAAAGGILGGWLLDRSGRKLSLLLCTVPFVTGFAVITAARDVWMLLGGRLLTGLACGVASLVAPVYISEIAYPAVRGLLGSCVQLMVVTGILLAYVAGWVLEWRWLAVLGCVPPTLMLLLMCYMPETPRFLLTQHQYQEAMAALRFLWGSEEGWEEPPVGAEHQGFQLALLRRPGIYKPLIIGISLMVFQQLSGVNAIMFYANSIFEEAKFKDSSLASVTVGIIQVLFTAVAALIMDRAGRRLLLALSGVIMVFSMSAFGTYFKLTQSLPSNSSHVGLVPIAAEPVDVQVGLAWLAVGSMCLFIAGFAVGWGPIPWLLMSEIFPLHVKGVATGICVLTNWFMAFLVTKEFNSVMEMLRPYGAFWLTAAFCALSVLFTLTVVPETKGRTLEQVTAHFEGR

SEQ ID NO: 23648 - protein, 493 aa, Mus musculus
MGTTKVTPSLVFAVTVATIGSFQFGYNTGVINAPETILKDFLNYTLEERLEDLPSEGLLTALWSLCVAIFSVGGMIGSFSVGLFVNRFGRRNSMLLVNLLAIIAGCLMGFAKIAESVEMLILGRLLIGIFCGLCTGFVPMYIGEVSPTALRGAFGTLNQLGIVVGILVAQIFGLDFILGSEELWPGLLGLTIIPAILQSAALPFCPESPRFLLINKKEEDQATEILQRLWGTSDVVQEIQEMKDESVRMSQEKQVTVLELFRSPNYVQPLLISIVLQLSQQLSGINAVFYYSTGIFKDAGVQEPIYATIGAGVVNTIFTVVSLFLVERAGRRTLHMIGLGGMAVCSVFMTISLLLKDDYEAMSFVCIVAILIYVAFFEIGPGPIPWFIVAELFSQGPRPAAIAVAGCCNWTSNFLVGMLFPSAAAYLGAYVFIIFAAFLIFFLIFTFFKVPETKGRTFEDIARAFEGQAHSGKGPAGVELNSMQPVKETPGNA

SEQ ID NO: 23649 - protein, 493 aa, Mus musculus
MGTTKVTPSLVFAVTVATIGSFQFGYNTGVINAPETILKDFLNYTLEERLEDLPSEGLLTALWSLCVAIFSVGGMIGSFSVGLFVNRFGRRNSMLLVNLLAIIAGCLMGFAKIAESVEMLILGRLLIGIFCGLCTGFVPMYIGEVSPTALRGAFGTLNQLGIVVGILVAQIFGLDFILGSEELWPGLLGLTIIPAILQSAALPFCPESPRFLLINKKEEDQATEILQRLWGTSDVVQEIQEMKDESVRMSQEKQVTVLELFRSPNYVQPLLISIVLQLSQQLSGINAVFYYSTGIFKDAGVQEPIYATIGAGVVNTIFTVVSLFLVERAGRRTLHMIGLGGMAVCSVFMTISLLLKDDYEAMSFVCIVAILIYVAFFEIGPGPIPWFIVAELFSQGPRPAAIAVAGCCNWTSSFLVGMLFPSAAAYLGAYVFIIFAAFLIFFLIFTFFKVPETKGRTFEDIARAFEGQAHSGKGPAGVELNSMQPVKETPGNA

SEQ ID NO: 23650 - protein, 509 aa, Mus musculus
MPSGFQQIGSDDGEPPRQRVTGTLVLAVFSAVLGSLQFGYNIGVINAPQKVIEQSYNATWLGRQGPGGPDSIPQGTLTTLWALSVAIFSVGGMISSFLIGIISQWLGRKRAMLANNVLAVLGGALMGLANAAASYEILILGRFLIGAYSGLTSGLVPMYVGEIAPTHLRGALGTLNQLAIVIGILVAQVLGLESMLGTATLWPLLLALTVLPALLQLILLPFCPESPRYLYIIRNLEGPARKSLKRLTGWADVSDALAELKDEKRKLERERPMSLLQLLGSRTHRQPLIIAVVLQLSQQLSGINAVFYYSTSIFESAGVGQPAYATIGAGVVNTVFTLVSVLLVERAGRRTLHLLGLAGMCGCAILMTVALLLLERVPAMSYVSIVAIFGFVAFFEIGPGPIPWFIVAELFSQGPRPAAMAVAGFSNWTCNFIVGMGFQYVADAMGPYVFLLFAVLLLGFFIFTFLKVPETRGRTFDQISAAFRRTPSLLEQEVKPSTELEYLGPDEND

SEQ ID NO: 23651 - protein, 509 aa, Mus musculus
MPSGFQQIGSDDGEPPRQRVTGTLVLAVFSAVLGSLQFGYNIGVINAPQKVIEQSYNATWLGRQGPGGPDSIPQGTLTTLWALSVAIFSVGGMISSFLIGIISQWLGRKRAMLANNVLAVLGGALMGLANAVASYEILILGRFLIGAYSGLTSGLVPMYVGEIAPTHLRGALGTLNQLAIVIGILVAQVLGLESMLGTATLWPLLLALTVLPALLQLILLPFCPESPRYLYIIRNLEGPARKSLKRLTGWADVSDALAELKDEKRKLERERPMSLLQLLGSRTHRQPLIIAVVLQLSQQLSGINAVFYYSTSIFESAGVGQPAYATIGAGVVNTVFTLVSVLLVERAGRRTLHLLGLAGMCGCAILMTVALLLLERVPAMSYVSIVAIFGFVAFFEIGPGPIPWFIVAELFSQGPRPAAMAVAGFSNWTCNFIVGMGFQYVADAMGPYVFLLFAVLLLGFFIFTFLKVPETRGRTFDQISAAFRRTPSLLEQEVKPSTELEYLGPDEND

SEQ ID NO: 23652 - protein, 508 aa, Mus musculus
MPSGFQQIGSDDGEPPRQRVTGTLVLAVFSAVLGSLQFGYNIGVINAPQKVIEQSYNATWLGRQGPGGPDSIPQGTLTTLWALSVAIFSVGGMISSFLIGIISQWLGRKRAMLANNVLAVLGGALMGLANAVASYEILILGRFLIGAYSGLTSGLVPMYVGEIAPTHLRGALGTLNRLAIVIGILVAQVLGLESMLGTATLWPLLLALTVLPALLQLILLPFCPESPRYLYIIRNLEGPARKSLKPLTGWADVSDALAELKDEKRKLERERPMSLLQLLGSRTHRQPLIIAVVLQLSQQLSGINAVFYYSTSIFESAGVGQPAYATIGAGVVNTVFTLVSVLLVERAGRRTLHLLGLAGMCGCAILMTVALLLLERVPAMSYVSIVAIFGFVAFFEIGPGPIPWFVAELFSQGPRPAAMAVAGFSNWTCNFIVGMGFQYVADRMGPYVFLLFAVLLLGFFIFTFLKVPETRGRTFDQISAAFRRTPSLLEQEVKPSTELEYLGPDEND

SEQ ID NO: 23653 - protein, 510 aa, Mus musculus
MPSGFQQIGSDVKDGEPPRQRVTGTLVLAVFSAVLGSLQFGYNIGVINAPQKVIEQSYNATWLGRQGPGGPDSIPQGTLTTLWALSVAIFSVGGMISSFLIGIISQWLGRKRAMLANNVLAVLGGALMGLANAVASYEILILGRFLIGAYSGLTSGLVPMYVGEIAPTHLRGALGTLNRLAIVIGILVAQVLGLESMLGTATLWPLLLALTVLPALLQLILLPFCPESPRYLYIIRNLEGPARKSLKPLTGWADVSDALAELKDEKRKLERERPMSLLQLLGSRTHRQPLIIAVVLQLSQQLSGINAVFYYSTSIFESAGVGQPAYATIGAGVVNTVFTLVSVLLVERAGRRTLHLLGLAGMCGCAILMTVALLLLERVPAMSYVSIVAIFGFVAFFEIGPGPIPWFVAELFSQGPRPAAMAVAGFSNWTCNFIVGMGFQYVADRMGPYVFLLFAVLLLGFFIFTFLKVPETRGRTFDQISAAFRRTPSLLEQEVKPSTELEYLGPDEND

SEQ ID NO: 23654 - protein, 501 aa, Mus musculus
MEEKHQEETGELTLVLALATLIAAFGSSFQYGYNVAAVNSPSEFMQQFYNDTYYDRNEENIESFTLTLLWSLTVSMFPFGGFIGSLMVGTLVNKLGRKGALLFNNIFSILPAILMGCSQIAQSFELIIISRLLVGICAGISSNVVPMYLGELAPKNLRGALGVVPQLFITVGILVAQLFGLRSLLANEDGWPVLLGLTGVPAGLQLLLLPFFPESPRYLLIQKKDEAAAERALQTLRGWKDVHLEMEEIRKEDEAEKAAGFISVWKLFTMQSLRWQLISMIVLMAGQQLSGVNAIYYYADQIYLSAGVKSDDVQYVTAGTGAVNVFMTILTIFVVELWGRRFLLLVGFSTCLIACLVLTAALALQNTISWMPYISIVCVIVYVIGHALGPSPIPALLITEIFLQSSRPAAYMIGGSVHWLSNFTVGLIFPFIQMGLGPYSFIIFATICFLTTIYIFMVVPETKGRTFIEINQIFTMKNKVSDVYPKKEEELGALPHAILEQ

SEQ ID NO: 23655 - protein, 478 aa, Rattus norvegicus
MSPEDPQETQPLLRSPGARAPGGRRVFLATFAAALGPLSFGFALGYSSPAIPSLRRTAPPALRLGDTAASWFGAVVTLGAAAGGVLGGWLLDRAGRKLSLLLCTVPFVTGFAVITAARDVWMLLGGRLLTGLACGVASLVAPVYISEIAYPAVRGLLGSCVQLMVVTGILLAYVAGWVLEWRWLAVLGCVPPTLMLLLMCYMPETPRFLLTQHQYQEAMAALRFLWGSEEGWEEPPVGAEHQGFQLAMLRRPGVHKPLIIGICLMVFQQLSGVNAIMFYANTIFEEAKFKDSSLASVTVGIIQVLFTAVAALIMDRAGRKLLLALSGVIMVFSMSAFGTYFKLTQSGPSNSSHVGLLVPISAEPADVHLGLAWLAVGSMCLFIAGFAVGWGPIPWLLMSEIFPLHIKGVATGVCVLTNWFMAFLVTKEFNSIMEILRPYGAFWLTAAFCILSVLFTLTFVPETKGRTLEQITAHFEGR

SEQ ID NO: 23656 - protein, 479 aa, Rattus norvegicus
MSPEDPQETQPLLRSPGARAPGGRRVFLATFAAALGPLSFGFALGYSSPAIPSLRRTAPPALRLGDTAASWFGAVVTLGAAAQGAVLGGWLLDRAGRKLSLLLCTVPFVTGFAVITAARDVWMLLGGRLLTGLACGVASLVAPVYISEIAYPAVRGLLGSCVQLMVVTGILLAYVAGWVLEWRWLAVLGCVPPTLMLLLMCYMPETPRFLLTQHQYQEAMAALRFLWGSEEGWEEPPVGAEHQGFQLAMLRRPGVHKPLIIGICLMVFQQLSGVNAIMFYANTIFEEAKFKDSSLASVTVGIIQVLFTAVAALIMDRAGRKLLLALSGVIMVFSMSAFGTYFKLTQSGPSNSSHVGLLVPISAEPADVHLGLAWLAVGSMCLFIAGFAVGWGPIPWLLMSEIFPLHIKGVATGVCVLTNWFMAFLVTKEFNSIMEILRPYGAFWLTAAFCILSVLFTLTFVPETKGRTLEQITAHFEGR

SEQ ID NO: 23657 - protein, 618 aa, Rattus norvegicus
MGERRRRQPEPGAPGGERSLLAAESAASLQGAELERAARRQFQRDETPAFVYAAAAFSALGGFLFGYDTGVVSGAMLLLRRQMRLGAMWQELLVSGAVGAAAVAALAGGALNGALGRRSAILLASALCTVGSAVLAAAANKETLLAGRLVVGLGIGIASMTVPVYIAEVSPPNLRGRLVTINTLFITGGQFFASVVDGAFSYLQKDGWRYMLGLAAIPAVIQFLGFLFLPESPRWLIQKGQTQKARRILSQMRGNQTIDEEYDSIRNSIEEEEKEASAAGPIICRMLSYPPTRRALAVGCGLQMFQQLSGINTIMYYSATILQMSGVEDDRLAIWLASITAFTNFIFTLVGVWLVEKVGRRKLTFGSLAGTTVALTILALGFLLSAQVSPRVTFRPTAPSGQNATCTEYSYCNECMLDPDCGFCYKINSSAVIDSSCVPVNKASTNEAAWGRCENETKFKAEDVHWAYSFCPTPYSWTALVGLVLYLVFFAPGMGPMPWTVNSEIYPLWARSTGNACSAGINWIFNVLVSLTFLHTAEYLTYYGAFFLYAGFAAVGLLFVYGCLPETKGKKLEEIESLFDHRLCTCGTADSDEGRYIEYIRVKGSNYHLSDNDASDVE

SEQ ID NO: 23658 - protein, 509 aa, Rattus norvegicus
MPSGFQQIGSEDGEPPQQRVTGTLVLAVFSAVLGSLQFGYNIGVINAPQKVIEQSYNATWLGRQGPGGPDSIPQGTLTTLWALSVAIFSVGGMISSFLIGIISQWLGRKRAMLANNVLAVLGGALMGLANAAASYEILILGRFLIGAYSGLTSGLVPMYVGEIAPTHLRGALGTLNQLAIVIGILVAQVLGLESMLGTATLWPLLLAITVLPALLQLLLLPFCPESPRYLYIIRNLEGPARKSLKRLTGWADVSDALAELKDEKRKLERERPLSLLQLLGSRTHRQPLIIAVVLQLSQQLSGINAVFYYSTSIFELAGVEQPAYATIGAGVVNTVFTLVSVLLVERAGRRTLHLLGLAGMCGCAILMTVALLLLERVPSMSYVSIVAIFGFVAFFEIGPGPIPWFIVAELFSQGPRPAAMAVAGFSNWTCNFIVGMGFQYVADAMGPYVFLLFAVLLLGFFIFTFLRVPETRGRTFDQISATFRRTPSLLEQEVKPSTELEYLGPDEND

SEQ ID NO: 23659 - protein, 493 aa, Rattus norvegicus
MGTAKVTPSLVFAVTVATIGSFQFGYNTGVINAPETIIKDFLNYTLEERLEDLPREGLLTTLWSLCVAIFSVGGMIGSFSVGLFVNRFGRRNSMLLVNLIAILGGCLMGFAKIAESVEMLILGRLIIGIFCGLCTGFVPMYIGEVSPTALRGAFGTLNQLGIVVGILVAQVFGLDFILGSEELWPGLLGLTIIPAILQSAALPFCPESPRFLLINRKEEDQATEILQRLWGTPDVIQEIQEMKDESIRMSQEKQVTVLELFKSPSYFQPLLISVVLQLSQQFSGINAVFYYSTGIFQDAGVQEPIYATIGAGVVNTIFTVVSLFLVERAGRRTLHMIGLGGMAVCSVFMTISLLLKDEYEAMSFVCIVAILVYVAFFEIGPGPIPWFIVAELFSQGPRPAAMAVAGCSNWTSNFLVGMFFPSAAAYLGAYVFIIFAAFLVFFLIFTSFKVPETKGRTFEDITRAFEGQAHSGKGSAGVELNSMQPVKETPGNA

SEQ ID NO: 23660 - protein, 509 aa, Rattus norvegicus
MPSGFQQIGSEDGEPPQQRVTGTLVLAVFSAVLGSLQFGYNIGVINAPQKVIEQSYNATWLGRQGPGGPDSIPQGTLTTLWALSVAIFSVGGMISSFLIGIISQWLGRKRAMLANNVLAVLGGALMGLANAAASYEILILGRFLIGAYSGLTSGLVPMYVGEIAPTHLRGALGTLNQLAIVIGILVAQVLGLESMLGTATLWPLLLAITVLPALLQLLLLPFCPESPRYLYIIRNLEGPARKSLKRLTGWADVSDALAELKDEKRKLERERPLSLLQLLGSRTHRQPLIIAVVLQLSQQLSGINAVFYYSTSIFELAGVEQPAYATIGAGVVNTVFTLVSVLLVERAGQRTLHLLGLAGMCGCAILMTVALLLLERVPSMSYVSIVAIFGFVAFFEIGPGPIPWFIVAELFSQGPRPAAMAVAGFSNWTCNFIVGMGFQYVADAMGPYVFLLFAVLLLGFFIFTFLRVPETRGRTFDQISATFRRTPSLLEQEVKPSTELEYLGPDEND

SEQ ID NO: 23661 - protein, 493 aa, Rattus norvegicus
MGTAKVTPSLVFAVTVATIGSFQFGYNTGVINAPETIIKDFLNYTLEERLEDLPSEGLLTTLWSLCVAIFSVGGMIGSFSVGLFVNRFGRRNSMLLVNLIAILGGCLMGFAKIAESVEMLILGRLIIGIFCGLCTGFVPMYIGEVSPTALRGAFGTLNQLGIVVGILVAQVFGLDFILGSEELWPGLLGLTIIPAILQSAALPFCPESPRFLLINRKEEDQATEILQRLWGTPDVIQEIQEMKDESIRMSQEKQVTVLELFKSPSYFQPLLISVVLQLSQQFSGINAVFYYSTGIFQDAGVQEPIYATIGAGVVNTIFTVVSLFLVERAGRRTLHMIGLGGMAVCSVFMTISLLLKDEYEAMSFVCIVAILVYVAFFEIGPGPIPWFIVAELFSQGPRPAAMAVAGCSNWTSNFLVGMFFPSAAAYLGAYVFIIFAAFLVFFLIFTFFKVPETKGRTFEDITRAFEGQAQSGKGSAGVELNSMQPVKETPGNA

SEQ ID NO: 23662 - protein, 502 aa, Rattus norvegicus
MEKEDQEKTGKLTLVLALATFLAAFGSSFQYGYNVAAVNSPSEFMQQFYNDTYYDRNKENIESFTLTLLWSLTVSMFPFGGFIGSLMVGFLVNNLGRKGALLFNNIFSILPAILMGCSKIAKSFEIIIASRLLVGICAGISSNVVPMYLGELAPKNLRGALGVAPQLFITVGILVAQLFGLRSVLASEEGWPILLGLTGVPAGLQLLLLPFFPESPRYLLIQKKNESAAEKALQTLRGWKDVDMEMEEIRKEDEAEKAAGFISVWKLFRMQSLRWQLISTIVLMAGQQLSGVNAIYYYADQIYLSAGVKSNDVQYVTAGTGAVNVFMTMVTVFVVELWGRRNLLLIGFSTCLTACIVLTVALALQNTISWMPYVSIVCVIVYVIGHAVGPSPIPALFITEIFLQSSRPSAYMIGGSVHWLSNFIVGLIFPFIQVGLGPYSFIIFAIICLLTTIYIFMVVPETKGRTFVEINQIFAKKNNVSDVYPEKEEKELNDLPPATREQ

SEQ ID NO: 23663 - protein, 502 aa, Rattus norvegicus
MEKEDQEKTGKLTLVLALATFLAAFGSSFQYGYNVAAVNSPSEFMQQFYNDTYYDRNKENIESFTLTLLWSLTVSMFPFGGFIGSLMVGFLVNNLGRKGALLFNNIFSILPAILMGCSKIAKSFEIIIASRLLVGICAGISSNVVPMYLGELAPKNLRGALGVVPQLFITVGILVAQLFGLRSVLASEEGWPILLGLTGVPAGLQLLLLPFFPESPRYLLIQKKNESAAEKALQTLRGWKDVDMEMEEIRKEDEAEKAAGFISVWKLFRMQSLRWQLISTIVLMAGQQLSGVNAIYYYADQIYLSAGVKSNDVQYVTAGTGAVNVFMTMVTVFVVELWGRRNLLLIGFSTCLTACIVLTVALALQNTISWMPYVSIVCVIVYVIGHAVGPSPIPALFITEIFLQSSRPSAYMIGGSVHWLSNFIVGLIFPFIQVGLGPYSFIIFAIICLLTTIYIFMVVPETKGRTFVEINQIFAKKNKVSDVYPEKEEKELNDLPPATREQ

SEQ ID NO: 23664 - protein, 502 aa, Rattus norvegicus
MEKEDQEKTGKLTLVLALATFLAAFGSSFQYGYNVAAVNSPSEFMQQFYNDTYYDRNKENIESFTLTLLWSLTVSMFPFGGFIGSLMVGFLVNNLGRKGALLFNNIFSILPAILMGCSKIAKSFEIIIASRLLVGICAGISSNVVPMYLGELAPKNLRGALGVVPQLFITVGILVAQLFGLRSVLASEEGWPILLGLTGVPAGLQLLLLPFFPESPRYLLIQKKNESAAEKALQTLRGWKDVDMEMEEIRKEDEAEKAAGFISVWKLFRMQSLRWQLISTIVLMTGQQLSGVNAIYYYADQIYLSAGVKSNDVQYVTAGTGAVNVFMTMVTVFVVELWGRRNLLLIGFSTCLTACIVLTVALALQNTISWMPYVSIVCVIVYVIGHAVGPSPIPALFITEIFLQSSRPSAYMIGGSVHWLSNFIVGLIFPFIQVGLGPYSFIIFAIICLLTSIYIFMVVPETKGRTFVEINQIFAKKNKVSDVYPEKEEKELNDLPPATREQ

SEQ ID NO: 23665 - protein, 464 aa, Escherichia coli O157:H7 EDL933
MPDAKKQGQSNKAMTFFVCFLAALAGLLFGLDIGVIAGALPFIADEFQITSHTQEWVVSSMMFGAAVGAVGSGWLSFKLGRKKSLMIGAILFVAGSLFSAAAPNVEVLILSRVLLGLAVGVASYTAPLYLSEIAPEKIRGSMISMYQLMITIGILGAYLSDTAFSYTGAWRWMLGVIIIPAILLLIGVFFLPDSPRWFAAKRRFVDAERVLLRLRDTSAEAKRELDEIRESLQVKQSGWALFKENSNFRRAVFLGVLLQVMQQFTGMNVIMYYAPKIFELAGYTNTTEQMWGTVIVGLTNVLATFIAIGLVDRWGRKPTLTLGFLVMAAGMGVLGTMMHIGIHSPSAQYFAIAMLLMFIVGFAMSAGPLIWVLCSEIQPLKGRDFGITCSTATNWIANMIVGATFLTMLNTLGNANTFWVYAGLNVLFILLTLWLVPETKHVSLEHIERNLMKGRKLREIGAHD

SEQ ID NO: 23666 - protein, 472 aa, Escherichia coli O157:H7 EDL933
MVTINTESALTPRSLRDTRRMNMFVSVAAAVAGLLFGLDIGVIAGALPFITDHFVLTSRLQEWVVSSMMLGAAIGALFNGWLSFRLGRKYSLMAGAILFVLGSIGSAFATSVEMLIAARVVLGIAVGIASYTAPLYLSEMASENVRGKMISMYQLMVTLGIVLAFLSDTAFSYSGNWRAMLGVLALPAVLLIILVVFLPNSPRWLAEKGRHIEAEEVLRMLRDTSEKAREELNEIRESLKLKQGGWALFKINRNVRRAVFLGMLLQAMQQFTGMNIIMYYAPRIFKMAGFTTTEQQMIATLVVGLTFMFATFIAVFTVDKAGRKPALKIGFSVMALGTLVLGYCLMQFDNGTASSGLSWLSVGMTMMCIAGYAMSAAPVVWILCSEIQPLKCRDFGITCSTTTNWVSNMIIGATFLTLLDSIGAAGTFWLYTALNIAFVGITFWLIPETKNVTLEHIERKLMAGEKLRNIGV

SEQ ID NO: 23667 - protein, 491 aa, Escherichia coli O157:H7 EDL933
MNTQYNSSYIFSITLVATLGGLLFGYDTAVISGTVESLNTVFVAPQNLSESAANSLLGFCVASALIGCIIGGALGGYCSNRFGRRDSLKIAAVLFFISGVGSAWPELGFTSINPDNTVPVYLAGYVPEFVIYRIIGGIGVGLASMLSPMYIAELAPAHIRGKLVSFNQFAIIFGQLLVYCVNYFIARSGDASWLNTDGWRYMFASECIPALLFLMLLYTVPESPRWLMSRGKQEQAEGILRKIMGNTLATQAVQEIKHSLDHGRKTGGRLLMFGVGVIVIGVMLSIFQQFVGINVVLYYAPEVFKTLGASTDIALLQTIIVGVINLTFTVLAIMTVDKFGRKPLQIIGALGMAIGMFSLGTAFYTQAPGIVALLSMLFYVAAFAMSWGPVCWVLLSEIFPNAIRGKALAIAVAAQWLANYFVSWTFPMMDKNSWLVAHFHNGFSYWIYGCMGVLAALFMWKFVPETKGKTLEELEALWEPETKKTQQTATL

SEQ ID NO: 23668 - protein, 443 aa, Escherichia coli O157:H7 EDL933
MQPSRNFDDLKFSSIHRRILLWGSGGPFLDGYILVMIGVALEQLTPALKLDADWIGLLGAGTLAGLFVGTSLFGYISDKVGRRKMFLIDIIAIGVISVATMFVSSPVELLVMRVLIGIVIGADYPIATSMITEFSSTRQRAFSISFIAAMWYVGATCADLVGYWLYDVEGGWRWMLGSAAIPCLLILIGRFELPESPRWLLRKGRVKECEEMMIKLFGEPVAFDEEQPQQTRFRDLFNRRHFPFVLFVAAIWTCQVIPMFAIYTFGPQIVGLLGLGVGKNAALGNVVISLFFMLGCIPPMLWLNTAGRRPLLIGSFAMMTLALAVLGLIPDMGIWLVVMAFAVYAFFSGGPGNLQWLYPNELFPTDIRASAVGVIMSLSRIGTIVSTWALPIFINNYGISNTMLMGAGISLFGLLISVAFAPETRGMSLAQTSNMTIRGQRMG

SEQ ID NO: 23669 - protein, 469 aa, Escherichia coli O157:H7 EDL933
MMGRCLFGFSGEKPFLLPDNEGVKMNTSPVRMDDLPLNRFHCRIAALTFGAHLTDGYVLGVIGYAIIQLTPAMQLTPFMAGMIGGSAHLGLFLGSLVLGWISDHIGRQKIFTFSFLLITLASFLQFFATTPEHLIGLRILIGIGLGGDYSVGHTLLAEFSPRRHRGVLLGAFSVVWTVGYVLASIAGHHFISENPEAWRWLLASAALPALLITLLRWGTPESPRWLLRQGRFAEAHAIVHRYFGPHVLLGDEVATATHKHIKTLFSSRYWRRTAFNSVFFVCLVIPWFVIYTWLPTIAQTIGLEDALTASLMLNALLIVGALLGLVLTHLLAHRKFLLGSFLLLAATLVVMACLPSGSSLTLLLFVLFSTTISAVSNLVGILPAESFPTDIRSLGVGFATAMSRLGAAVSTGLLPWVLAQWGMQVTLLLLAAVLLAGFVVTWLWAPETKALPLVAAGNVGGANEHSVSV

SEQ ID NO: 23670 - protein, 531 aa, Aspergillus nidulans
MAFKKSYNVYFLCGFMTLGGGLFGFDISSMSGVLGTAAYNNYFQVGGGNYKQGGITCAMPFGSLVGALASSFLADKYSRVTAIQFSSTLWIIGSVFQCAANGIPLLVVGRVIAGLCVGIASAMVPVYIAEVSPKHIRGRMISLQQWAITWGILIQYFIQYGASNVDGGPDNETQSTAAFRIPWGIQIVPGVIYFVGLFLYPKSPRWLASKDRWDECMHVLARLHGNGDMNHPLVLAQYKEIQDALALEREQASTSYQELIKPRIAKRVFLGMSLQMWSQLSGMNVMMYYIVYIMQSTGAGSPLLTASIQYILNTALTLPAILWLDRFGRRPAILIGFTMQAIFLYIEGGLQAGYGRSTRPSDDLNAISWTVADHPGVGKAIIAMSYLFVCSFATTIGPTSWTYPAEIYPAKVRAKAVSLATASNWTWNCLLALFVPPLLWNINWKMYMIFAAFNTVAALHMFLTAPETKGYTLEEMDEVFESGIAPWKKRKISSRLEQIEREIAEGNLKVTDRTGPVDPVQENVGEPEKAV

SEQ ID NO: 23671 - protein, 495 aa, Anopheles gambiae str. PEST
IVHQVKMAEEKTTPMAALKQTLLSLSVSLSYYCIGLVRGYSAPAVPSMHATVPDLLPSKSIASWVSSIPPFGAFFGSLVAFPLMHRIGRKYTVLIASPLWVISWILIATANDWRVLFVARMLSGFGAGLSLPAAQVYVSECSDPKIRGVIGSLPALSMSVGILVMYIMGKFFHWRLLAWICCGMACCLFLAVACFPQSPVWLKTRKQYEKAHYSAKWLHLQGFSIDPKATSAVVERKEKQHSSPAEPTPKPFSKEALLRREILIPLGIGLVLLSIQQLSGIDAVVFFTVEIFHAAGSSMDGHLATIIVGTVQVLSNGAALFVVDRAGRKPLLIMSGLIMCLAMASMGAAFHLNSIGNTCFGYLPVVSLIVFMVGFSIGFGSIPFLLMGELFPTAQRSLLSSLAGSFNLAMMFTVIKTYHPLEDLITTSGTFLMYSVLCALGVVFVITCVPETKGRELESIQKLFERRPQPCSQLELGGEKASHDNPSFSAADEAV

SEQ ID NO: 23672 - protein, 468 aa, Shigella flexneri 2a str. 301
MEGIMPDAKKQGRSNKAMTFFVCFLAALAGLLFGLDIGVIAGALPFIADEFQITSHTQEWVVSSMMFGAAVGAVGIGWLSFKLGRKKSLMIGAILFVAGSLFSAAAPNVEVLILSRVLLGLAVGVASYTAPLYLSEIAPEKIRGSMISMYQLMITIGILGAYLSDTAFSYTGAWRWMLGVIIIPAILLLIGVFFLPDSPRWFAAKRRFVDAERVLLRLRDTSAEAKRELDEIRESLQVKQSGWALFKENSNFRRAVFLGVLLQVMQQFTGMNVIMYYAPKIFELAGYTNTTEQMWGTVIVGLTNVLATFIAIGLVDRWGRKPTLTLGFLVMAAGMGVLGTMMHIGIHSPSAQYFAIAMLLMFIVGFAMSAGPLIWVLCSEIQPLKGRDFGITCSTATNWIANMIVGATFLTMLNTLGNANTFWVYAALNVLFILLTLWLVPETKHVSLEHIERNLMKGRKLREIGAHD

SEQ ID NO: 23673 - protein, 507 aa, Shigella flexneri 2a str. 301
MSQQFNPYLCCFRPDTCVNCSRIFSQCLTLCWQEKMVTINTESALTPRSLRDTRRMNMFVSVAAAVAGLLFGLDIGVIAGALPFITDHFVLTSRLQEWVVSSMMLGAAIGALFNGWLSFRLGRKYSLMAGAILFVLGSIGSAFATSVEMLIAARVVLGIAVGIASYTAPLYLSEMASENVRGKMISMYQLMVTLGIVLAFLSDTAFSYSGNWRAMLGVLALPAVLLIILVVFLPNSPRWLAEKGRHIEAEEVLRMLRDTSEKAREELNEIRESLKLKQGGWALFKINRNVRRAVFLGMLLQAMQQFTGMNIIMYYAPRIFKMAGFTTTEQQMIATLVVGLTFMFATFIAVFTVDKAGRKPALKIGFSVMALGTLVLGYCLMQFDNGTASSGLSWLSVGMTMMCIAGYAMSAAPVVWILCSEIQPLKCRDFGITCSTTTNWVSNMIIGAAFLTLLDSIGAAGTFWLYTALNIAFVGITFWLIPETKNVTLEHIERKLMAGEKLRNIGV

SEQ ID NO: 23674 - protein, 491 aa, Shigella flexneri 2a str. 301
MNTQYNSSYIFSITLVATLGGLLFGYDTAVISGTVESLNTVFVAPQNLSESAANSLLGFCVASALIGCIIGGALGGYCSNRFGRRDSLKISAVLFFISGVGSAWPELGFTSINPDNTVPIYLAGYVPEFVIYRIIGGIGVGLASMLSPMYIAELAPAHIRGKLVSFNQFAIIFGQLLVYCVNYFIARSGDASWLNTDGRRYMFASECIPALLFLMLLYTVPESPRWLMSRGKQEQTESILRKIMGNTLATQAVQEIKHSLDHGRKTGGRLLMFGVGVIVIGVMLSIFQQFVGINVVLYYAPEVFKTLGASTDIALLQTIIVGVINLTFTVLAIMTVDKFGRKPLQIIGALGMAIGMFSLGTAFYTQASGIVALLSMLFYVAAFAMSWGPVCWVLLSEIFPNAIRGKALAIAVAAQWLANYFVSWTFPMMDKNSWLVAHFHNGFSYWIYGCMGVLAALFMWKFVPETKGKTLEELEALWEPETKKTQQTATL

SEQ ID NO: 23675 - protein, 469 aa, Shigella flexneri 2a str. 301
MTGRCLFGFSGEKPFLLPDNEGVKMNTSPVRMDDLPLNRFHCRIATLTFGAHLTDGYVLGVIGYAIIQLTPAMQLTPFMAGMIGGSALLGLFLGSLVLGWISDHIGRQKIFTFSFLLITLASFLQFFATTPEHLIGLRILIGIGLGGDYSVGHTLLAEFSPRRHRGILLGAFSVVWTVGYVLASIAGHHFISENPEAWRWLLASAALPALLITLLRWGTPESPRWLLCQGRFAEAHAIVHRYFGPHVLLGDEVVTATHKHIKTLFSSRYWRRTAFNSVFFVCLVIPWFVIYTWLPTIAQTIGLEDALTASLMLNALLIVGALLGLVLTHLLAHRKFLLGSFLLLAATLVVMACLPSGSSLTLLLFVLFSTTISAVSNLVGILPAESFPTDIRSLGVGFATAMSRLGAAVSTGLLPWVLAQWGMQVTLLLLATVLLVGFVVTWLWAPETKALPLVAAGNVGGANEHSVSV

SEQ ID NO: 23676 - protein, 451 aa, Shigella flexneri 2a str. 2457T
MTFFVCFLAALAGLLFGLDIGVIAGALPFIADEFQITSHTQEWVVSSMMFGAAVGAVGIGWLSFKLGRKKSLMIGAILFVAGSLFSAAAPNVEVLILSRVLLGLAVGVASYTAPLYLSEIAPEKIRGSMISMYQLMITIGILGAYLSDTAFSYTGAWRWMLGVIIIPAILLLIGVFFLPDSPRWFAAKRRFVDAERVLLRLRDTSAEAKRELDEIRESLQVKQSGWALFKENSNFRRAVFLGVLLQVMQQFTGMNVIMYYAPKIFELAGYTNTTEQMWGTVIVGLTNVLATFIAIGLVDRWGRKPTLTLGFLVMAAGMGVLGTMMHIGIHSPSAQYFAIAMLLMFIVGFAMSAGPLIWVLCSEIQPLKGRDFGITCSTATNWIANMIVGATFLTMLNTLGNANTFWVYAALNVLFILLTLWLVPETKHVSLEHIERNLMKGRKLREIGAHD

SEQ ID NO: 23677 - protein, 472 aa, Shigella flexneri 2a str. 2457T
MVTINTESALTPRSLRDTRRMNMFVSVAAAVAGLLFGLDIGVIAGALPFITDHFVLTSRLQEWVVSSMMLGAAIGALFNGWLSFRLGRKYSLMAGAILFVLGSIGSAFATSVEMLIAARVVLGIAVGIASYTAPLYLSEMASENVRGKMISMYQLMVTLGIVLAFLSDTAFSYSGNWRAMLGVLALPAVLLIILVVFLPNSPRWLAEKGRHIEAEEVLRMLRDTSEKAREELNEIRESLKLKQGGWALFKINRNVRRAVFLGMLLQAMQQFTGMNIIMYYAPRIFKMAGFTTTEQQMIATLVVGLTFMFATFIAVFTVDKAGRKPALKIGFSVMALGTLVLGYCLMQFDNGTASSGLSWLSVGMTMMCIAGYAMSAAPVVWILCSEIQPLKCRDFGITCSTTTNWVSNMIIGAAFLTLLDSIGAAGTFWLYTALNIAFVGITFWLIPETKNVTLEHIERKLMAGEKLRNIGV

SEQ ID NO: 23678 - protein, 468 aa, Escherichia coli CFT073
MEGIMPDAKKQGRSNKAMTFFVCFLAALAGLLFGLDIGVIAGALPFIADEFQITSHTQEWVVSSMMFGAAVGAVGSGWLSFKLGRKKSLMIGAILFVAGSLFSAAAPNVEVLILSRVLLGLAVGVASYTAPLYLSEIAPEKIRGSMISMYQLMITIGILGAYLSDTAFSYTGAWRWMLGVIIIPAILLLIGVFFLPDSPRWFAAKRRFVDAERVLLRLRDTSAEAKRELDEIRESLQVKQSGWALFKENSNFRRAVFLGVLLQVMQQFTGMNVIMYYAPKIFELAGYTNTTEQMWGTVIVGLTNVLATFIAIGLVDRWGRKPTLTLGFLVMAAGMGVLGTMMHIGIHSPSAQYFAIAMLLMFIVGFAMSAGPLIWVLCSEIQPLKGRDFGITCSTATNWIANMIVGATFLTMLNTLGNANTFWVYAALNVLFILLTLWLVPETKHVSLEHIERNLMKGRKLREIGAHD

SEQ ID NO: 23679 - protein, 515 aa, Escherichia coli CFT073
MEYPSHNDMSQQFNPYLCYFRPDTCVSCSRIFSLCLTLCWQEKMVTINTESALTPRPLRDTRRMNMFVSVAAAVAGLLFGLDIGVIAGALPFITDHFVLTSRLQEWVVSSMMLGAAIGALFNGWLSFRLGRKYSLMAGAILFVLGSIGSAFATSVEMLIAARVVLGIAVGIASYTAPLYLSEMASENVRGKMISMYQLMVTLGIVLAFLSDTAFSYSGNWRAMLGVLALPAVLLIILVVFLPNSPRWLAEKGRHIEAEEVLRMLRDTSEKAREELNEIRESLKLKQGGWALFKINRNVRRAVFLGMLLQAMQQFTGMNIIMYYAPRIFKMAGFTTTEQQMIATLVVGLTFMFATFIAVFTVDKAGRKPALKIGFSVMALGTLVLGYCLMQFDNGTASSGLSWLSVGMTMMCIAGYAMSAAPVVWILCSEIQPLKCRDFGITCSTTTNWVSNMIIGATFLTLLDSIGAAGTFWLYTALNIAFVGITFWLIPETKNVTLEHIERKLMAGEKLRNIGV

SEQ ID NO: 23680 - protein, 469 aa, Escherichia coli CFT073
MTGRCLFGFSGEKPFLLPDNEGVKMNTSPVRMDDLPLNRFHCRIAALTFGAHLTDGYVLGVIGYAIIQLTPAMQLTPFMAGMIGGSALLGLFLGSLVLGWISDHIGRQKIFTFSFMLITLASFLQFFATTPEHLIGLRILIGIGLGGDYSVGHTLLAEFSPRRHRGILLGAFSVVWTVGYVLASIAGHHFISESPEAWRWLLASAALPALLITLLRWGTPESPRWLLRQGRFAEAHAIVHRYFGPHVLLGDEVATATHKHIKTLFSSRYWRRTAFNSVFFVCLVIPWFVIYTWLPTIAQTIGLEDALTASLMLNALLIVGALLGLVLTHLLAHRRFLLGSFLLLTATLVVMACLPSGSSLTLLLFVLFSTTISAVSNLVGILPAESFPTDIRSLGVGFATAMSRLGAAVSTGLLPWVLAQWGMQATLLLLAAVLLVGFVVTWLWAPETKALPLVAAGNVGGANEHSVSV

SEQ ID NO: 23681 - protein, 443 aa, Escherichia coli CFT073
MQPSRNFDDLKFSSIHRRILLWGSGGPFLDGYVLVMIGVALEQLTPALKLDADWIGLLGAGTLAGLFVGTSLFGYISDKVGRRKMFLIDIIAIGVISVATMFVSSPVELLVMRVLIGIVIGADYPIATSMITEFSSTRQRAFSISFIAAMWYVGATCADLVGYWLYDVEGGWRWMLGSAAIPCLLILIGRFELPESPRWLLRKGRVKECEEMMIKLFGEPVAFEEEQPQQTRFRDLFNRRHFPFVLFVAAIWTCQVIPMFAIYTFGPQIVGLLGLGVGKNAALGNVVISLFFMLGCIPPMLWLNTAGRRPLLIGSFAMMTLALAVLGLIPDMGIWLVVMAFAVYAFFSGGPGNLQWLYPNELFPTDIRASAVGVIMSLSRIGTIVSTWALPIFINNYGISNTMLMGAGISLFGLLISVAFAPETRGMSLAQTSNMTIRGQRMG

SEQ ID NO: 23682 - protein, 457 aa, Bacillus subtilis subsp. subtilis str. 168
MKKQSNIWLYFFGALGGALYGYDTGVISGAILFMKKELGLNAFTEGLVVSSLLVGAILGSGAAGKLTDRFGRKKAIMAAALLFCIGGLGVALAPNTGVMVLFRIILGLAVGTSTTIVPLYLSELAPKHKRGALSSLNQLMITVGILLSYIVNYIFADAEAWRWMLGLAAVPSLLLLIGILFMPESPRWLFTNGEESKAKKILEKLRGTKDIDQEIHDIKEAEKQDEGGLKELFDPWVRPALIAGLGLAFLQQFIGTNTIIYYAPKTFTNVGFGNSASILGTVGIGTVNVLMTLVAIKIIDKIGRKPLLLFGNAGMVISLIVLALVNLFFNNTPAASWTTVICLGVFIVVFAVSWGPVVWVMLPELFPLHVRGIGTGVSTLMLHVGTLIVSLTYPILMEAIGISYLFLIYAAIGIMAFLFVRFKVTETKGRSLEEIEQDLRDKNGQGGAAGKQQTVGT

SEQ ID NO: 23683 - protein, 464 aa, Bacillus subtilis subsp. subtilis str. 168
MKNTPTQLEPNVPVTRSHSMGFVILISCAAGLGGLLYGYDTAVISGAIGFLKDLYSLSPFMEGLVISSIMIGGVVGVGISGFLSDRFGRRKILMTAALLFAISAIVSALSQDVSTLIIARIIGGLGIGMGSSLSVTYITEAAPPAIRGSLSSLYQLFTILGISATYFINLAVQRSGTYEWGVHTGWRWMLAYGMVPSVIFFLVLLVVPESPRWLAKAGKTNEALKILTRINGETVAKEELKNIENSLKIEQMGSLSQLFKPGLRKALVIGILLALFNQVIGMNAITYYGPEIFKMMGFGQNAGFVTTCIVGVVEVIFTVIAVLLIDKVGRKKLMSIGSAFMAIFMILIGTSFYFELTSGIMMIVLILGFVAAFCVSVGPITWIMISEIFPNHLRARAAGIATIFLWGANWAIGQFVPMMIDSFGLAYTFWIFAVINILCFLFVVTICPETKNKSLEEIEKLWIK

SEQ ID NO: 23684 - protein, 513 aa, Glycine max
  unsure (1)..(513): unsure at all Xaa locations
MAGGSFTTGTVSKERAEQYKGRVTAYVIISCIVAATGGALFGYDIGISGGVTSMDDFLIEFFPSVYRQKKHAHENNYCKYDNQGLAAFTSSLYIAGLVASLMASPVTRKYGRRVSIIGGGISFLIGSALNASAVNLIMLILGRVMLGVGIGFGNQAIPLGSSEMAPTHLRGGLNMMFQVATTFGIFTANMINFGTQKIKPWGWRLSLGLAAVPALLMTVGGIFLPDTPNSLIERGLAEKGRKLLEKIRGTKEVDAEFQDMVDASELAKSIKHPFRNILERRYRPELVMAIFMPTFQILTGINSILFYAPVLFQSMGFGGDASLISSALTGGVLASSTFISIATVDRLGRRVLLVSGGLQMITCQIIVAIILGVKFGADQELSKGFSILVVVVICLFVVAFGWSWGPLGWTVPSEIFPLEIRSAGQGITVAVNLLFTFIIAQAFLALLCSFKFGIFLFFAGWITIMTIFVYLFLPETKGIPIEEMSFMWRRHWFWKRICPDGSIXITHANDVMK

SEQ ID NO: 23685 - protein, 235 aa, Lycopersicon esculentum
KRRNRPQLIMAIMMPTFQILTGINIILFYAPVLFQSMGFKRAASLYSSALTGAVLASSTLLSMATVDRWGRRVLLITGGIQMIICQVIVAIILGLKFGSDKELSRGYSIIVVVFICLFVAAFGYSWGPLGWTVPSEIFPLETRSAGQSITVTVNLFFTFAIAQSFLSLLCAMRFGIFLFFSCWIAVMTIFIYLFLPETKGVPIEEMMRLWEKHWFWKKIVSEDQQVKNTNGLNHA

SEQ ID NO: 23686 - protein, 525 aa, Oryza sativa
  unsure (1)..(525): unsure at all Xaa locations
MPGGSLLNSGGNGGGGGSGGGLTFPVVVTCLMAASGGLIFGYDIGISGGVSEMESFLEKFFPGLLKGTAHAXXKDVYCIYNSQALTAFTSSLYAFGMVGTLVASRVTRRTGRQAVMLIGGSMFLVGALVNAAAVNIAMLIIGRMLLGLGLGFSGQATPVYLAEMSPPRWRGGFISGFPLFISVGYLIANLINYGTSRIPVWGWRLSLGLAAFPAAVMVAGAAFIPDTPSSLVLRGKHDLARAALQXGARQGRRRRRRXFNDILAAVEHDRRNDEGAFRRXXLRREYRPYLVMAIAFPVFLNLTGVAVTAFFSPILFRTVGFESDAALMGAVILGLMNIFGIVGSGFAMDRYGRRLLFMIGGALMFTCQVAMASIVGSQLGHGSKMAKGYAVTVLVMTCAFSASFSWSWGALYWAIPGEIYPVEVRSAGQGVAVALNLGLNFVQAQCFLAMLCCFKYGTFLFYASWLVVMTAFAVAFVPETKGVPLESMGHVFARHWYWGRFVKEQVRRRVDLKFAPHMPMRNVWL

SEQ ID NO: 23687 - protein, 262 aa, Triticum aestivum
  unsure (1)..(262): unsure at all Xaa locations
XAMLIVGRMMLGLGLGFSGQATPVYLAEMSPPRWRGGFISAFPLFISVGYLVANLINYGTSRIPEWGWRLSLGLAAVPAAVMVLGAVLITDTPSSLVLRGMHDHARAALQRVRGKGVDVDAEFSDILAAVEHDRRNQEGAFRRILRREYRPYLVMAVAFPVFLNLTGVTVSAFFSPILFRTIGFGSDAALMGAIILGLMNIGGIIASGVAMDRYGRKLLFAIGGALMFTCQVAMASIAGTHLGHGSKMPKGYAVAVLVLTCV

SEQ ID NO: 23688 - protein, 648 aa, Gibberella fujikuroi
  unsure (1)..(648): unsure at all Xaa locations
MTERELHADVRRFYQHTSQTLTGLRTLSHRARSPRCSRGVAAKGQHRECHREAVRKGSPDSGGTTDTVIPLSAAEKRALINEIDHSFSENGMWMVIFTVSLSAFLQGFVQSSQNGANLFADQWLKSQKHTVNSQFAYANAAVYFSAAVIRMSTGCTDEFTVWSPWCHYCRLISHLCGIRWLGFITLNDNAWLSLRSIRLIGGVGMGLKATSTPILAAETAVGSWRGSSVLLWQLWVSFGIMMSFIVNICLNQIDDKNLKLRLILASPAVFALMLMYTVAKCPESFRYYLMPGSRKYSPEKHMPRCYDCATPRLQAVRDLYLTYKGIDTEFENERYDSIKAAPKPRALVVGAVSHYVRQYWKILKVHRFGMQLLQQGLWLCRSNFLEFNLMAFYGGTTLVGISPGNQPTEDQISKAMLYNLIFGLSNFLFCLPAIHSIDVLGRRRVLLFTIQPSGSTVCYKRLVPVRVSLTLKTVHTVFYSPGMGPVPFVLASESFPLAFRDTGASLAISINLLFAGLLAWLQPLLVTGIRFGGTLGVFAGLNVVAFALIFLLMEETSGVPLESLGSVFDQSKKDLIHFQLFKFLPWFGRFILGRSSLAERPERTVDLSPXSVTAASVTDDDDEERIWNSDTVSSGVRLADMLGGNGRG

SEQ ID NO: 23689 - protein, 594 aa, Neurospora crassa
MAIFAMGWQKPDNVAGSSAPAIMVGLFVATGGLLLGYDTGTINGILAMKSFKDHFSTGYIDGNGQPGIYPKESALIVAMLSAGTAIGALLAAPLGDHYGRRRSLIGAIGIFVIGAILQVCAYNIDLLVAGRTVAGVGIGIVSVLVPLYQSEMAPKWIRGTLVCTYQLSITMGLLAAAVVNILTYKLKTAAAYRVPIGLQLTWACVLALGLTVLPETPRYLIKRGDKNAAALSLSRLRRLDITHPALVEELAEIEANHQYEMALGPDSYKDILFGEPHLGRRTFTGCCLQMLQQLTGVNFIMYYGTTFFNNAGVGNPFKISLIMQVINTASTIPGLFVVESWGRRRLLMVGAIGMAICQLLIAAFATASGSNNLSAQNKVLITFVAIYIFFFAASWGPVVWVVTSEIYPLKVRAKSMSITTASNWFLNFGIAYGTPYMQTNSAASDESSIDLGSKVFFVWGAFCIVAVGFVWCMVYETSKISLEQIDEMYERVDHAWHSRRFEPSWSFQEMRDLGFSDGGIPPTQQLQQQPQQPQQQQQQHHQQQQHQLQVDLQQSQSRTSNSSTSQTDTGGSNNTGASQDDKLVASLGNIDLSY

SEQ ID NO: 23690 - protein, 594 aa, Neurospora crassa
MAIFAMGWQKPDNVAGSSAPAIMVGLFVATGGLLLGYDTGTINGILAMKSFKDHFSTGYIDGNGQPGIYPKESALIVAMLSAGTAIGALLAAPLGDHYGRRRSLIGAIGIFVIGAILQVCAYNIDLLVAGRTVAGVGIGIVSVLVPLYQSEMAPKWIRGTLVCTYQLSITMGLLAAAVVNILTYKLKTAAAYRVPIGLQLTWACVLALGLTVLPETPRYLIKRGDKNAAALSLSRLRRLDITHPALVEELAEIEANHQYEMALGPDSYKDILFGEPHLGRRTFTGCCLQMLQQLTGVNFIMYYGTTFFNNAGVGNPLKISLIMQVINTASTIPGLFVVESWGRRRLLMVGAIGMAICQLLIAAFATASGSNNLSAHNKVLITFVAIYIFFFAASWGPVVWVVTSEIYPLKVRAKSMSITTASNWFLNFGIAYGTPYMQTNSAASDESSIDLGSKVFFVWGAFCIVAVGFVWCMVYETSKISLEQIDEMYERVDHAWHSRRFEPSWSFQEMRDLGFSDGGIPPTQQLQQQPQQPQQQQQQHHQQQQHQLQVDLQQSQSRTSNSSTSQTDTGGSNNTGASQDDKLVASLGNIDLSY

SEQ ID NO: 23691 - protein, 537 aa, Neurospora crassa
MYKIGNIYFIAAVAVIGGALFGFDISSMSAIISTQPYLCQFNQLGHNEKGLCLGPTNDVQGGITAAMPGGSWLGALCSGFVSDTFGRKRSIQIGSVIWIIGSVIVCASVNIPMLVVGRIINGFSVGICSAQVPVYISEIALPSKRGRLVGFQQWAITWGILIMFFICYGCSFMKGTAAFRVPWGLQAIPAALLFLGLVFLPESPRWLCKKDRWDEAKDVLTLVHGKGNPNSPWVHREMQEIREMVEFERANADVSYFELFKPNMINRTSIGVFTQIWSQLTGMNVMMYYITYVFTMAGLADGSENAVLLPSGIQFVINVVMTIPALLWMDRWGRRPTLLVGAFFMCLWLCVNAGLFAVYSRPARPGEFTSPAESMAITGAPAKAVIASTYLFVASFAPTWGPVSWTYPPELYPLRLRGKAVALCTSANWAFNFALAYFVPPAFANITWKTYVIFATFCAAMFIHVFFMFPETANKPLEEVEEIFDDTKPGAIKYIGTPAWKTRNTRNLTLKQEHNDTLSSEEKIGLEEHAHKETTGR

SEQ ID NO: 23692 - protein, 606 aa, Caenorhabditis elegans
MVAVAAFSSSGQDKPAHTPKLGLFVYILAAASVIGGFLFGYDTSVVSAAMLYMPDAPGLKPMDTVWQEVLVSISPGMAAVGSLMSGTSSDYIGRRKVILGASAIFTIGALVCAASVNKIMLLVGRVLLGIAIGFASMIVPVYLGETAPTHVRGMLVAAFALMISFGQVVANITGGAFSYIDPYNVGWRLMFAFAAVPSIIQFVCFMFLPETPRWLYENGFETETREVLEKVYNGDKEWVEYEMAEIIAFNEDQAKENEKAHASGPVIWRILKTPHVLKACFIGSMLQAFQQLAGINTILYYTADIIRSSGISNNHTTIWISVLLSLCNFIGPFVPMSLIEKVGRRIIFLFSCGLVVLSLVFIGVAFLLVNHDSAATLPANQYGSNFNSSYPDAKGCMAYSNCDYCVTTDACGFCHDANTKQGYCLPAGFDNPEVYSSTGSCTNSNGSIANNFKWEKYYCDTKYTLLPIIACGVYLLTFSSGFTSLPWVLNSEFYPMWARSTCVAISTTSNWVFNLIIALTYLSLTQVIGKYGAFWLYAGLTVIAFIFILFLVPETKGYSIEEVEMLFMNKKQRREAESRRRETVTEVRSRMNSTVSFGQHNEVHKY

SEQ ID NO: 23693 - protein, 613 aa, Caenorhabditis elegans
MVAVEFKVSESGRPRPEKNPKLGFFVYLLGSAAIIGGFLFGYDTSVVSAAMLYVPEAPGLKPMGTVWKEVIVSITPGMAAVGAWFSGAGSDRYGRKPIIIGSTLIFVCGAVICAVAWTKIVMLIGRIFLGVGIGFASMVVPVYLGEASPTHVRGTLVSAFAMMISFGQVVANIMGGVFSYWEPYTIGWRLMFAFAGIPALIQFVCFIFLPETPRWLYENGHTEQAEQVLEKIYGGNTEWIEYELAEIKTYAEERQKQMEEEKKSGPVIWRILKTPHVLKACFIGSMLQAFQQLAGINTILYYTADIIRSAGIENYHTIIWISVILSICNLIGPFAPMFFIEKLGRRKLFLFSCAGVVVSLVLIGVSFLLVGNDSAPNFDRSAYLLAGNYQSNGEAESCLMLSNCDSCVTSEHCGFCEDSETRTGFCLPVDHNDVTLYSSTGLCTNGLDKSNSSFPNATSYVWQKHHCTTSYTILPIVMMGVYLLTFSCGFTSLPWVLNSEFYPMWARSTCVSISTLSNWVFNLIIALTYLSLTHAITKYGAFWLYAIFTIIAFIFIYFLVPETTGYSIDEVEMLFMNKRQRNIAMQARQAKLDAASDKDKNSSTSLSTETITM

SEQ ID NO: 23694 - protein, 604 aa, Caenorhabditis elegans
MVQVAPVAAGAGSGQTRPSSDPKTGWFVYMLAFSAVIGGFLFGYDTGIVSAAMLYVPNASGIKPLDSVWQEIIVSITPGVAAIGSLCSGPGSDFLGRKKIIIGASVTFTIGAIICAAAWTKIILLIGRILLGLAIGFASMIVPIYVSEASPSHIRGKLVTGFQLMITVGLVIANIIGGAFSYVDPDQVGWRLMFAFAAVPAIIQFVCFLFLPESPRWLYEHGRTVEAREVLTRIYNGHTEWVDYEINEISFSYEEELRAKAEHAGNGPTIIRILKTPHVRKAMIIGSLLQMFQQLSGINTVMYYTGNIIRSAGVKDNHTTIWISVGTSAINFLGTFIPIALVERVGRRVLLLVSMIGVILFLIAMGVSFLLINNDSLRTFDQQNYTLNYNPSVKHAAKCLKYSNCDFCVTDENCGFCESKVAKKGYCLPFPSDDSSDYSATGICEFSNLTNNGTDFEWEDTYCHTKFTVLPIIIMVFYLLSFSAGYAPLPWVLNAEFYPLWARSTAVSVSTACNWIFNLIVSLTFLSLSQAATKYGTFFIYCGCTMVALVFVFFFVPETKGYSIDEVEMLFMTKEERRKAQKVLDESKEGKHRNSVAMSFDTKF

SEQ ID NO: 23695 - protein, 639 aa, Caenorhabditis elegans
MVQVAPVAAGAGSGQTRPSSDPKTGWFVYMLAFSAVIGGFLFGYDTGIVSAAMLYVPNASGIKPLDSVWQEIIVSITPGVAAIGSLCSGPGSDFLGRKKIIIGASVTFTIGAIICAAAWTKIILLIGRILLGLAIGFASMIVPIYVSEASPSHIRGKLVTGFQLMITVGLVIANIIGGAFSYVDPDQVGWRQKSDFFLEFLLPNSQLISIFSKFHFQSFPNPPFSRLMFAFAAVPAIIQFVCFLFLPESPRWLYEHGRTVEAREVLTRIYNGHTEWVDYEINEISFSYEEELRAKAEHAGNGPTIIRILKTPHVRKAMIIGSLLQMFQQLSGINTVMYYTGNIIRSAGVKDNHTTIWISVGTSAINFLGTFIPIALVERVGRRVLLLVSMIGVILFLIAMGVSFLLINNDSLRTFDQQNYTLNYNPSVKHAAKCLKYSNCDFCVTDENCGFCESKVAKKGYCLPFPSDDSSDYSATGICEFSNLTNNGTDFEWEDTYCHTKFTVLPIIIMVFYLLSFSAGYAPLPWVLNAEFYPLWARSTAVSVSTACNWIFNLIVSLTFLSLSQAATKYGTFFIYCGCTMVALVFVFFFVPETKGYSIDEVEMLFMTKEERRKAQKVLDESKEGKHRNSVAMSFDTKF

SEQ ID NO: 23696 - protein, 433 aa, Drosophila melanogaster
MTDRTITSFEVTKDAGSWVGGIMPLAALAGGITGGPLIEYLGRRSTILATAVPFIVSSLLIACAVNVIMILCGRFLTGFCVGIASLSLPVYLGETLQPEVRGTLGLLPTALGNIGILVCYVAGSFMNWSMLAFLGAALPVPFLILMIIIPETPRWFVNRGQEERARKALKWLRGKEADVEPELKELMQSQADADRQATQNTCLELFKRNNLKPLSISLGLMFFQQFSGINAVIFYTVQIFKDAGSTIDSNLSTIIVGVVNFFATFMGIILIDRLGRKILLYVSDIAMIVTLSILGGFFYCKAHGPDVSHLGWLPLTCFVIYILGFSLGFGPIPWLMMGEILPAKIRGPAASVVTAFNWFCTFVVTKTFQDLTVAMGAHGAFWLFGAICIVGLFFVIIFVPETRGKSLEEIERKMMGRVPMSSVVNIKPFPFNM

SEQ ID NO: 23697 - protein, 488 aa, Drosophila melanogaster
MKILMRADTHVSFSVPADGLKANFTFSQVLAALSVSLCSLVVGFVSAYTSPALVSMTDRTITSFEVTKDAGSWVGGIMPLAALAGGITGGPLIEYLGRRSTILATAVPFIVSSLLIACAVNVIMILCGRFLTGFCVGIASLSLPVYLGETLQPEVRGTLGLLPTALGNIGILVCYVAGSFMNWSMLAFLGAALPVPFLILMIIIPETPRWFVNRGQEERARKALKWLRGKEADVEPELKELMQSQADADRQATQNTCLELFKRNNLKPLSISLGLMFFQQFSGINAVIFYTVQIFKDAGSTIDSNLSTIIVGVVNFFATFMGIILIDRLGRKILLYVSDIAMIVTLSILGGFFYCKAHGPDVSHLGWLPLTCFVIYILGFSLGFGPIPWLMMGEILPAKIRGPAASVVTAFNWFCTFVVTKTFQDLTVAMGAHGAFWLFGAICIVGLFFVIIFVPETRGKSLEEIERKMMGRVPMSSVVNIKPFPFNM

SEQ ID NO: 23698 - protein, 498 aa, Danio rerio
MNEYEENRPLLVNDERTEEDRSEQDAYLDKVKNGKLFIATFAAVLGPLSFGFVLGYSSPAIPELRRIQDLRLQLSVEEASWFGSVVTIGAALGGLLGGWIVERIGRKLSLMFCAIPFIFGFTTIIAAQNHWMFYVGRVLTGLASGVTSLVVPLYISEMAHERVRGTLGSCVQLMVVIGIMGAYVTGLFLDWRWLAVASSIPPTLMLLSMCFMPETPRFLLCQGKRREAEDALRFLRGPDAPAEWECARIEDAYKNEEQSFSLGDLKDPGVYKPLGIGVMMMLLQQFTGINAIMFYAETIFEQAHFKSSDVATVIVAATQVVFTAIAALIMDKAGRKVLLILSGVVMCVSEAVFGVYFKLTVMKPNNSSMTSVLTDTHGLLEDQPSADLAWLAVGSMGFFIAGFAIGWGPTPWLVMSEIFPTRVRGLGSALCVLTNWTCAFIVTKTFQNLMDALSSAGTFWMFSALCASNVVFTAFFVPETKGKTLEEIQAGFKGTRMR

SEQ ID NO: 23699 - protein, 464 aa, Escherichia coli K12
MPDAKKQGRSNKAMTFFVCFLAALAGLLFGLDIGVIAGALPFIADEFQITSHTQEWVVSSMMFGAAVGAVGSGWLSFKLGRKKSLMIGAILFVAGSLFSAAAPNVEVLILSRVLLGLAVGVASYTAPLYLSEIAPEKIRGSMISMYQLMITIGILGAYLSDTAFSYTGAWRWMLGVIIIPAILLLIGVFFLPDSPRWFAAKRRFVDAERVLLRLRDTSAEAKRELDEIRESLQVKQSGWALFKENSNFRRAVFLGVLLQVMQQFTGMNVIMYYAPKIFELAGYTNTTEQMWGTVIVGLTNVLATFIAIGLVDRWGRKPTLTLGFLVMAAGMGVLGTMMHIGIHSPSAQYFAIAMLLMFIVGFAMSAGPLIWVLCSEIQPLKGRDFGITCSTATNWIANMIVGATFLTMLNTLGNANTFWVYAALNVLFILLTLWLVPETKHVSLEHIERNLMKGRKLREIGAHD

SEQ ID NO: 23700 - protein, 443 aa, Escherichia coli K12
MQPSRNFDDLKFSSIHRRILLWGSGGPFLDGYVLVMIGVALEQLTPALKLDADWIGLLGAGTLAGLFVGTSLFGYISDKVGRRKMFLIDIIAIGVISVATMFVSSPVELLVMRVLIGIVIGADYPIATSMITEFSSTRQRAFSISFIAAMWYVGATCADLVGYWLYDVEGGWRWMLGSAAIPCLLILIGRFELPESPRWLLRKGRVKECEEMMIKLFGEPVAFDEEQPQQTRFRDLFNRRHFPFVLFVAAIWTCQVIPMFAIYTFGPQIVGLLGLGVGKNAALGNVVISLFFMLGCIPPMLWLNTAGRRPLLIGSFAMMTLALAVLGLIPDMGIWLVVMAFAVYAFFSGGPGNLQWLYPNELFPTDIRASAVGVIMSLSRIGTIVSTWALPIFINNYGISNTMLMGAGISLFGLLISVAFAPETRGMSLAQTSNMTIRGQRMG

SEQ ID NO: 23701 - protein, 401 aa, Escherichia coli O157:H7
MMGRCLFGFSGEKPFLLPDNEGVKMNTSPVRMDDLPLNRFHCRIAALTFGAHLTDGYVLGVIGYAIIQLTPAMQLTPFMAGMIGGSAHLGLFLGSLVLGWISDHIGRQKIFTFSFLLITLASFLQFFATTPEHLIGLRILIGIGLGGDYSVGHTLLAEFSPRRHRGVLLGAFSVVWTVGYVLASIAGHHFISENPEAWRWLLASAALPALLITLLRWGTPESPRWLLRQGRFAEAHAIVHRYFGPHVLLGDEVATATHKHIKTLFSSRYWRRTAFNSVFFVCLVIPWFVIYTWLPTIAQTIGLEDALTASLMLNALLIVGALLGLVLTHLLAHRKFLLGSFLLLAATLVVMACLPSGSSLTLLLLFSSAPPFRQSVIWWAFCLRKVFLLTFARWASVLPPP

SEQ ID NO: 23702 - protein, 496 aa, Gallus gallus
MADKKKITASLIYAVSVAAIGSLQFGYNTGVINAPEKIIQAFYNRTLSQRSGETISPELLTSLWSLSVAIFSVGGMIGSFSVSLFVNRFGRRNSMLLVNVLAFAGGALMALSKIAKAVEMLIIGRFIIGLFCGLCTGFVPMYISEVSPTSLRGAFGTLNQLGIVVGILVAQIFGLEGIMGTEALWPLLLGFTIVPAVLQCVALLFCPESPRFLLINKMEEEKAQTVLQKLRGTQDVSQDISEMKEESAKMSQEKKATVLELFRSPNYRQPIIISITLQLSQQLSGINAVFYYSTGIFERAGITQPVYATIGAGVVNTVFTVVSLFLVERAGRRTLHLVGLGGMAVCAAVMTIALALKEKWIRYISIVATFGFVALFEIGPGPIPWFIVAELFSQGPRPAAMAVAGCSNWTSNFLVGMLFPYAEKLCGPYVFLIFLVFLLIFFIFTYFKVPETKGRTFEDISRGFEEQVETSSPSSPPIEKNPMVEMNSIEPDKEVA

SEQ ID NO: 23703 - protein, 496 aa, Gallus gallus
MADKKKITASLIYAVSVAAIGSLQFGYNTGVINAPEKIIQAFYNRTLSQRSGETISPELLTSLWSLSVAIFSVGGMIGSFSVSLFFNRFGRRNSMLLVNVLAFAGGALMALSKIAKAVEMLIIGRFIIGLFCGLCTGFVPMYISEVSPTSLRGAFGTLNQLGIVVGILVAQIFGLEGIMGTEALWPLLLGFTIVPAVLQCVALLFCPESPRFLLINKMEEEKAQTVLQKLRGTQDVSQDISEMKEESAKMSQEKKATVLELFRSPNYRQPIIISITLQLSQQLSGINAVFYYSTGIFERAGITQPVYATIGAGVVNTVFTVVSLFLVERAGRRTLHLVGLGGMAVCAAVMTIALALKEKWIRYISIVATFGFVALFEIGPGPIPWFIVAELFSQGPRPAAMAVAGCSNWTSNFLVGMLFPYAEKLCGPYVFLIFLVFLLIFFIFTYFKVPETKGRTFEDISRGFEEQVETSSPSSPPIEKNPMVEMNSIEPDKEVA

SEQ ID NO: 23704 - protein, 482 aa, Gallus gallus
MAAEESQYLLAHRTSDAYLRVQNKKLYLATFAAVLGPLSFGFVLGYSSPAIPELRKIDNPKLRLDSNQASWFGSIVTLGAAAGGILGGYLVDKIGRKLSLMLCSIPFVSGYIVIISAQNVWMLYFGRILTGLASGITSLVVPVYISEISHTDVRGMLGSFVQLMVVTGILGAYIAGLTLKWHWLAVLCSFPPCVMLLFMLFMPETPRFLLDQKKRAEAIAALQFLRGPYVDHEWECRQIEANVEEEGLSLFEFKNPSIYRPLLIGVILMFLQQVTGINAVMSYAETIFEDANFQDSRMASVVVGFIQVCFTAVAALIIDKTGRKVLLYVSGMIMALSTALFGFYFKMVLPNGNNSSNTDLWFTLNSVTPGTDTRLSWLAVVSLGLFVAGFALGWGPVPWLVMSEIFPLKARGVSSSACVLTNWVMAFLVTKEFHDFIGFLTSYGTFWLFSAFCCLSVTFAAFYVPETKGRTLEQIEAYFRKS

SEQ ID NO: 23705 - protein, 490 aa, Gallus gallus
MESGSKMTARLMLAVGGAVLGSLQFGYNTGVINRPQKVIEDFYNHTWLYRYEEPISPATLTTLWSLSVAIFSVGGMIGSFSVGLFVNRFGRRNSMLMSNILAFLAAVLMGFSKMALSFEMLILGRFIIGLYSGLTTGFVPMYVGEVSPTALRGALGTFHQLGIVLGILIAQVFGLDLIMGNDSLWPLLLGFIFVPALLQCIILPFAPESPRFLLINRNEENKAKSVLKKLRGTTDVSSDLQEMKEESRQMMREKKVTIMELFRSPMYRQPILIAIVLQLSQQLSGINAVFYYSTSIFEKSGVEQPVYATIGSGVVNTAFTVVSLFVVERAGRRTLHLIGLAGMAGCAILMTIALTLLDQMPWMSYLSIVAIFGFVAFFEIGPGPIPWFIVAELFSQGPRPAAFAVAGLSNWTSNFIVGMGFQYIAQLCGSYVFIIFTVLLVLFFIFTYFKVPETKGRTFDEIAYRFRQGGASQSDKTPDEFHSLGADSQV

SEQ ID NO: 23706 - protein, 533 aa, Gallus gallus
MDGKSKMQAEKHLTGTLVLSVFTAVLGFFQYGYSLGVINAPQKVIEAHYGRMLGAIPMVRHATNTSRDNATITVTIPGTEAWGSSEGTLAPSAGFEDPTVSPHILTMYWSLSVSMFAVGGMVSSFTVGWIGDRLGRVKAMLVVNVLSIAGNLLMGLAKMGPSHILIIAGRAITGLYCGLSSGLVPMYVSEVSPTALRGALGTLHQLAIVTGILISQVLGLDFLLGNDELWPLLLGLSGVAALLQFFLLLLCPESPRYLYIKLGKVEEAKKSLKRLRGNCDPMKEIAEMEKEKQEAASEKRVSIGQLFSSSKYRQAVIVALMVQISQQFSGINAIFYYSTNIFQRAGVGQPVYATIGVGVVNTVFTVISVFLVEKAGRRSLFLAGLMGMLISAVAMTVGLVLLSQFAWMSYVSMVAIFLFVIFFEVGPGPIPWFIVAELFSQGPRPAAIAVAGFCNWACNFIVGMCFQYIADLCGPYVFVVFAVLLLVFFLFAYLKVPETKGKSFEEIAAAFRRKKLPAKSMTELEDLRGGEEA

SEQ ID NO: 23707 - protein, 464 aa, Salmonella enterica subsp. enterica serovar Typhi
MPDNKKQGRSNKAMTFFVCFLAALAGLLFGLDIGVIAGALPFITDEFQITAHTQEWVVSSMMFGAAVGAVGSGWLSFKLGRKKSLMIGAILFVAGSLFSAAAPNVEVLIISRVLLGLAVGVASYTAPLYLSEIAPEKIRGSMISMYQLMITIGILGAYLSDTAFSYSGAWRWMLGVIIIPAILLLIGVFFLPDSPRWFAAKRRFHDAERVLLRLRDTSAEAKRELDEIRESLQVKQSGWALFKENSNFRRAVFLGILLQVMQQFTGMNVIMYYAPKIFELAGYTNTTEQMWGTVIVGLTNVLATFIAIGLVDRWGRKPTLTLGFLVMAIGMGILGTMMHIGIHSPSAQYFAIAMLLMFIIGFAMSAGPLIWVLCSEIQPLKGRDFGITCSTATNWIANMIVGATFLTMLNNLGNANTFWVYAGLNVLFILLTLWLVPETKHVSLEHIERNLMKGRKLREIGAHD

SEQ ID NO: 23708 - protein, 471 aa, Salmonella enterica subsp. enterica serovar Typhi
MVSINDSALTPRSLRDTRRMNMFVSVSAAVAGLLFGLDIGVIAGALPFITDHFVLTSRLQEWVVSSMMLGAAIGALFNGWLSFRLGRKYSLMAGAILFVLGSLGSAFASSVEVLIGARVILGVAVGIASYTAPLYLSEMASENVRGKMISMYQLMVTLGIVLAFLSDTAFSYSGNWRAMLGVLALPAVLLIILVVFLPNSPRWLAQKGRHIEAEEVLRMLRDTSEKARDELNEIRESLKLKQGGWALFKANRNVRRAVFLGMLLQAMQQFTGMNIIMYYAPRIFKMAGFTTTEQQMIATLVVGLTFMFATFIAVFTVDKAGRKPALKIGFSVMALGTLVLGYCLMQFDNGTASSGLSWLSVGMTMMCIAGYAMSAAPVVWILCSEIQPLKCRDFGITCSTTTNWVSNMIIGATFLTLLDSIGAAGTFWLYTALNIAFIGITFWLIPETKNVTLEHIERKLMAGEKLRNIGV

SEQ ID NO: 23709 - protein, 477 aa, Homo sapiens [sequence omitted]

SEQ ID NO: 23710 - protein, 477 aa, Homo sapiens
MTPEDPEETQPLLGPPGGSAPRGRRVFLAAFAAALGPLSFGFALGYSSPAIPSLQRAAPPAPRLDDAAASWFGAVVTLGAAAGGVLGGWLVDRAGRKLSLLLCSVPFVAGFAVITAAQDVWMLLGGRLLTGLACGVASLVAPVYISEIAYPAVRGLLGSCVQLMVVVGILLAYLAGWVLEWRWLAVLGCVPPSLMLLLMCFMPETPRFLLTQHRRQEAMAALRFLWGSEQGWEDPPIGAEQSFHLALLRQPGIYKPFIIGVSLMAFQQLSGVNAVMFYAETIFEEAKFKDSSLASVVVGVIQVLFTAVAALIMDRAGRRLLLVLSGVVMVFSTSAFGAYFKLTQGGPGNSSHVAISAPVSAQPVDASVGLAWLAVGSMCLFIAGFAVGWGPIPWLLMSEIFPLHVKGVATGICVLTNWLMAFLVTKEFSSLMEVLRPYGAFWLASAFCIFSVLFTLFCVPETKGKTLEQITAHFEGR

SEQ ID NO: 23711 - protein, 477 aa, Homo sapiens
MTPEDPEETQPLLGPPGGSAPRGRRVFLAAFAAALGPLSFGFALGYSSPAIPSLQRAAPPAPRLDDAAASWFGAVVTLGAAAGGVLGGWLVDRAGRKLSLLLCSVPFVAGFAVITAAQDVWMLLGGRLLTGLACGVASLVAPVYISEIAYPAVRGLLGSCVQLMVVVGILLAYLAGWVLEWRWLAVLGCVPPSLMLLLMCFMPETPRFLLTQHRRQEAMAALRFLWGSEQGWEDPPIGAEQSFHLALLRQPGIYKPFIIGVSLMAFQQLSGVNAVMFYAETIFEEAKFKDSSLASVVVGVIQVLFTAVAALIMDRAGRRLLLVLSGVVMVFSTSAFGAYFKLTQGGPGNSSHVAISAPVSAQPVDASVGLAWLAVGNMCLFIAGFAVGWGPIPWLLMSEIFPLHVKGVATGICVLTNWLMAFLVTKEFSSLMEVLRPYGAFWLASAFCIFSVLFTLFCVPEIKGKTLEQITAHFEGR

SEQ ID NO: 23712 - protein, 629 aa, Homo sapiens
  unsure (1)..(629): unsure at all Xaa locations
MGERRRKQPEPDAASAAGECSLLAAAESSTSLQSAGAGGGGVGDLERAARRQFQQDETPAFVYVVAVFSALGGFLFGYDTGVVSGAMLLLKRQLSLDALWQELLVSSTVGAAAVSALAGGALNGVFGRRAAILLASALFTAGSAVLAAANNKETLLAGRLVVGLGIGIASMTVPVYIAEVSPPNLRGRLVTINTLFITGGQFFASVVDGAFSYLQKDGWRYMLGLAXVPAVIQFFGFLFLPESPRWLIQKGQTQKARRILSQMRGNQTIDEEYDSIKNNIEEEEKEVGSAGPVICRMLSYPPTRRALIVGCGLQMFQQLSGINTIMYYSATILQMSGVEDDRLAIWLASVTAFTNFIFTLVGVWLVEKVGRRKLTFGSLAGTTVALIILALGFVLSAQVSPRITFKPIAPSGQNATCTRYSYCNECMLDPDCGFCXKMNKSTVIDSSCVPVNKASTNEAAWGRCENETKFKTEDIFWAYNFCPTPYSWTALLGLILYLVFFAPGMGPMPWTVNSEIYPLWARSTGNACSSGINWIFNVLVSLTFLHTAEYLTYYGAFFLYAGFAAVGLLFIYGCLPETKGKKLEEIESLFDNRLCTCGTSDSDEGRYIEYIRVKGSNYHLSDNDASDVE

SEQ ID NO: 23713 - protein, 520 aa, Homo sapiens
MEFHNGGHVSGIGGFLVSLTSRMKPHTLAVTPALIFAITVATIGSFQFGYNTGVINAPETIIKEFINKTLTDKANAPPSEVLLTNLWSLSVAIFSVGGMIGSFSVGLFVNRFGRRNSMLIVNLLAATGGCLMGLCKIAESVEMLILGRLVIGLFCGLCTGFVPMYIGEISPTALRGAFGTLNQLGIVIGILVAQIFGLELILGSEELWPVLLGFTILPAILQSAALPCCPESPRFLLINRKKEENATRILQRLWGTQDVSQDIQEMKDESARMSQEKQVTVLELFRVSSYRQPIIISIVLQLSQQLSGINAVFYYSTGIFKDAGVQQPIYATISAGVVNTIFTLLSLFLVERAGRRTLHMIGLGGMAFCSTLMTVSLLLKNHYNGMSFVCIGAILVFVACFEIGPGPIPWFIVAELFSQGPRPAAMAVAGCSNWTSNFLVGLLFPSAAYYLGAYVFIIFTGFLITFLAFTFFKVPETRGRTFEDITRAFEGQAHGADRSGKDGVMGMNSIEPAKETTTNV

SEQ ID NO: 23714 - protein, 497 aa, Homo sapiens
MDNRQNVTPALIFAITVATIGSFQFGYNTGVINAPETIIKEFINKTLTDKANAPPSEVLLTNLWSLSVAIFSVGGMIGSFSVGLFVNRFGRRNSMLIVNLLAATGGCLMGLCKIAESVEMLILGRLVIGLFCGLCTGFVPMYIGEISPTALRGAFGTLNQLGIVIGILVAQIFGLELILGSEELWPVLLGFTILPAILQSAALPCCPESPRFLLINRKKEENATRILQRLWGTQDVSQDIQEMKDESARMSQEKQVTVLELFRVSSYRQPIIISIVLQLSQQLSGINAVFYYSTGIFKDAGVQQPIYATISAGVVNTIFTLLSLFLVERAGRRTLHMIGLGGMAFCSTLMTVSLLLKNHYNGMSFVCIGAILVFVACFEIGPGPIPWFIVAELFSQGPRPAAMAVAGCSNWTSNFLVGLLFPSAAYYLGAYVFIIFTGFLITFLAFTFFKVPETRGRTFEDITRAFEGQAHGADRSGKDGVMGMNSIEPAKETTTNV

SEQ ID NO: 23715 - protein, 357 aa, Ovis aries
QVIITHYRHVLGVSLDDGIAINNYALNSTKELPTSPGGPTPVSWAEEEAMTSASLITMFWSLSVSSFAVGGMIASFFGGLLGDKLGRIKALLVANILSLVGALLMGFSKLGPSHILIISGRGISGLYCGLISGLVPMYIGEIAPTTLRGAIGALHQLAVVTGILISQIVGLDFILGNHELWHILLGLSAVPAILQCLLLFFCPESPRYLYIKLDEEAKAKKSLKRLRGSDDVTKDITEMRKEREEASNEKKVSIIQLFTNASYRQPILVALMLHAAQQFSGINGIFYYSTSIFQTAGISQPVYATIGVGAVNTVFTAVSVFLVEKAGRRSLFLIGMSGMFVCAIFMSVGLVLLNKLP

SEQ ID NO: 23716 - protein, 622 aa, Mus musculus
MVPVENTEGPNLLNQKGREAETEGSCGASGGGHPACAGGPSMFTFLTSVTAAISGLLVGYELGLISGALLQIRTLLALTCHEQEMVVSSLLIGAFLASLTGGVLIDRYGRRLAIILSSCLLGLGSLVLIMSLSYTLLIMGRVAIGVSISLSSIATCVYIAEIAPQHRRGLLVSLNELMIVTGILFAYISNYAFANISNGWKYMFGLVIPLGVLQAIAMYFLPPSPRFLVMKGQEESAGKVLRKLRVISDTTEELTLIKSSLKDEYQYSFWDLFRSKDNMRTRILIGLTLVFFVQTTGQPNILFYASTVLKSVGFQSNEAASLASTGVGVVKVVSTIPATLLVDHIGSKTFLCIGSSVMSASLLTMGIVNLNINMNFTNICRSHSLLNQSLEEFVFYATGNLSISNSSLREHFKRITPYSKGSFMPMGNGMEPKGEMTFTSSLPNAGLSRTEHQGVTDTAVVPAAYKWLSLASLLVYVAAFSIGLGPMPWLVLSEIFPGGIRGRAMALTSSMNWGVNLLISLTFLTVTDLIGLSWVCFIYTIMSLASLAFVVLFIPETKGCSLEQISVELAKANYVKNNICFMSHHQEELVPTQLQKRKPQEQLPECNHLCGRGQSQRPSPDT

SEQ ID NO: 23717 - protein, 622 aa, Mus musculus
MVPVENTEGPNLLNQKGREAETEGSCGASGGGHPACAGGPSMFTFLTSVTAAISGLLVGYELGLISGALLQIRTLLALTCHEQEMVVSSLLIGAFLASLTGGVLIDRYGRRLAIILSSCLLGLGSLVLIMSLSYTLLIMGRVAIGVSISLSSIATCVYIAEIAPQHRRGLLVSLNELMIVTGILFAYISNYAFANISNGWKYMFGLVIPLGVLQAIAMYFLPPSPRFLVMKGQEESAGKVLRKLRVISDTTEELTLIKSSLKDEYQYSFWDLFRSKDNMRTRILIGLTLIFFVQTTGQPNILFYASTVLKSVGFQSNEAASLASTGVGVVKVVSTIPATLLVDHIGSKTFLCIGSSVMSASLLTMGIVNLNINMNFTNICRSHSLLNQSLEEFVFYATGNLSISNSSLREHFKRITPYSKGSFMPMGNGMEPKGEMTFTSSLPNAGLSRTEHQGVTDTAVVPAAYKWLSLASLLVYVAAFSIGLGPMPWLVLSEIFPGGIRGRAMALTSSMNWGVNLLISLTFLTVTDLIGLSWVCFIYTIMSLASLAFVVLFIPETKGCSLEQISVELAKANYVKNNICFMSHHQEELVPTQLQKRKPQEQLPECNHLCGRGQSQRPSPDT

SEQ ID NO: 23718 - protein, 535 aa, Rhodopseudomonas palustris
MRWNRSDALPLTFRKTVHRLPMDRHVRRWRRGTPQPEWECMADSVSAAITEPPQVPPAATGRVIDTDIPARLDGLLWSRFHTRVVAALGITWILDGLEVTLAGALAGALKDSPSLRFSNLDVGLANSAYLAGAVIGALGFGWLTDRIGRKKLFFITLALYLTATAATALSWSVTSYALFRLLTGAGIGGEYTAINSTIQELVPARYRGWTDLVINGSFWIGAAIGAVCAIVLLDPAVIDPDHGWRLAYLTGAVIGLVVFAMRWWIPESPRWLMIHGQPERAEAIVADIEQSARHAPDRPRVLPKIKLRMRTHTPLLEVAKTLFGTYRQRSLVGLVLMTAQAFFYNAIFFTYALILTDFFGISANHVGWYILPFAAGNFLGPLLLGRLFDTLGRRTMIGFTYGVSGLLLALSGYLFSIGALSAQSQTIAWMVIFFFASPAASAAYLTVSETFPLEVRALAIAIFYAIGTGIGGVAGPALFGALIDTGSRGSVFAGYLFGSVLMMAAAVIGWRYGIAAERRSLEHVARPLAATEDIR

SEQ ID NO: 23719 - protein, 472 aa, Burkholderia fungorum
MSTAYQPRASAAARLERLPFSGYHRTIFIIIAIAFFFDSVDLGTMTFVLGSIRTEFGLSSATAGLVASASFFGMVIGAAIAGLLADRFGRRPVFQWSMVLWGLASYLCSTAQSVEALIFYRVLLGFGMGMEFPIAQTLLSEFVPAASRGRLIALMDGFWPLGFIAAGVVSYFVLPTFGWRTEFALLAIPAVFVLIVRRMVPESPRWLEHRGRFGEADKILAEVEVKVMKAAGLSQLRPPAMLAEPPAAQGTGAFREIWSIAYRRRTIMVWTLWFFALLGFYGLTSWLGALMQQAGFAVTKSVLYTVLISLGGIPGFICAAWLVERWGRKPTCIASLAGSAVMAYVYGQTALHAQTPTLLICAGLAMQFFLFAMWAVLYTYTPELYGTGARATGSGFASAIGRVGSLIGPYVVGVVLPVFGQGGVFSLGAMCFVIAAAAVWILGIETRGLALETLVSEAVETDARGVLSPMRD

SEQ ID NO: 23720 - protein, 461 aa, Burkholderia fungorum
MSAYGANVAQRLDALETGPFHWRLLGLIGGGMFFDAFDNFLAGSVLGALVQQGLSDMHMNALFISMSFAGLTLGAWGAGVIGDRFGRRFSYQFNLLIFGLTSIAAAFAPSMTWLIVLRFIMGIGLGAEIVVGYSTLNEFMPAHARGRFASLLNLITNSSVLVSAACGFLIIPHFGWRWMFAIPGIGALVIWYLRKKMPESPRWLAAVGRHQEAREVVEKIEAQSLRRDAPLPVAPQEEEPGRLRDLFAARQLSRTLVGISVICISFTAMYAFVAWVPTFLVKQGFDITHSLLITSAMFAGGPAGSLISMAIADRIGRKWGLVIFSALGAMIGMAYPYVTHAVTIALVGFGVTTCIYVTSALGVACYVTELFPTRLRLRGVGLANAAGRAVNVGVPYVVAAMYALAGLLGVVSFIAALFALLVVILITLGVETRQRTLEEVQAQAGGDSGIDVKKPLNIGGM

SEQ ID NO: 23721 - protein, 450 aa, Burkholderia fungorum
AVIDLRIPWRLLFLIGAGLFLDAFDVYLGGVVTGALLKSGWSTLELNAWFTTLTFAGLTIGAWCAGILGDRFGRRFSYQLNLLIFGGASLAAAFAPSMTWLIALRFIMGIGMGAEIVISYGMLSEFVPPRYRGRLLAALSLFANSAVFVASLASLWIIPTFGWRYMFAITGVAATIVWVMRKKMPESPRWLVSQGRLEEAEAVLDGIETSVAKRHVLPDYLREDTVRAETVPLSVLFRTPVLWRSIVGSLIMVTIGYSVYGLINWLPSFFVQQGFNIVKSLTYSTVMSLGAPAGTVIGIFITDRMGRRPAIIGATLATAAIGLLYQHAASSAELLTAGFCLVAGIYVLVAVGQGAYVPELFATSYRLRGSGVCGTAGRAASALCQFFVLWLFTVGGVNMVVGSVVAVQLLLALAVWLLKIETSGLRLEQTVETGISTGTQERHRTVDISH

SEQ ID NO: 23722 - protein, 439 aa, Burkholderia fungorum
VSLPFFFDISDIFTFSYAAPALVKEWGLTMSSIAMLTSAGFFGMFLGATLGGMLSDKIGRKRALICYVIAYSVFSLANALAPDIPMLMITRVLTGVGISSATAVVMAYIAELFPAKTRGTWQSWAMVIALMGIPITSWVARLVVPSGPDGWRWIFVWGALGIVFLVFTKHFPESPRWLARQGRMEEADRTLSLIEAEVVRTTGPLPEAVAINRPAEVRAPWTSMFKGQYIGRTMTLWAIWIFQTLGFYGFQAWVPTLLVQHGITIVHSLTYITLINIGAVPGALIAVFLADRFERKFSIAGAAALIAVFGLLYGLSFQPVLIVSFGFLVGMLIQTFAALCYAYTPEQYPTDIRNTGAGFAYGMGRLANVGNSFIVAGIFMNFGYVWVFVYIAGAWLATAAVTLLFGARTTGRRLESINPVLAQAADNPLDAPILRPGDR

SEQ ID NO: 23723 - protein, 450 aa, Burkholderia fungorum
MSTSVNAGARLDRLPISRFHWKILFLIGAGVAIDAFDIYLGGTVMAATVKTGFATLHQGALFISLTFTGMLIGAGAAGYVGDRFGRRYSYQTNLLVFGLAAVGCWLAPNMPMLIVGRFIMGVGLGAEVVVATGTLCEFVPPAYRGRWAALMSLMIHIGVLAATGLSYLIIPRFGWRVMFLIAALGALVIWIMRKRMPESPRWLESVGREAEAQAVLERIEAEVARHHGSLPPVQLQPSVTAAADGRSSLAALFARGQLRKTLVGTVTGVTINIALYGFLSWIPTFLVKQGLEVSTSLGFATIIAFGGPLGVLAGLLFTDRVGRKKGLIGFAAVSAVLGVAYSHLQGQVLIGTVGFLVEGTIYGLATIGLYGFIPELFPTAIRLRGTGWCGVCSRGASIGMPYLTVMLFERFGVSGVTSMVAGVLLLLIVTVGLFSEETSQRSLESIALQD

SEQ ID NO: 23724 - protein, 468 aa, Burkholderia fungorum
MHAKETKVAIGIVNSGARLDRLPIASFHWKILGLISAGAFLDAFDIYLAAGALGAMVKAGFSDLKLNALFISVTFLGMLIGAGFAGYLGDRFGRRSSYQTNLLIFGIASIAACFVPNMMWLIVLRLIMGVGLGAELVVAAGTLCEFIPPASRGRWTALLALIINSGLLVSTAVGYVVIPHLGWRYMFAIAGVGAIIVWVLRHRMPESPRWLESVGRSDEAEATVSAIEHEVQRQKGSLPPVERIENLEVPKAPFSALFSHAMLGRTLVAILTAVAVNISVYGFVAWLPTFFVKEGLTIVQSLGFTTLMAFGAPGGALIGFLCADRVGRARGLVIFAIATIVVGFIYPNMHAGWAISSVGFVLVTCIYTVTTLGLFAYIPELFPTELRLRGTGTAGVCGRAASMTTPYLAVVLYNSFGVSGVLAMVSGVLALLVLGILLLRVETNQHALERISPSLDTDSDPMPATQQG

SEQ ID NO: 23725 - protein, 462 aa, Burkholderia fungorum
MQSTAYAASRLDRLPLSGFHWRLLCVIGFGLFLEFFDLYTGGAIVGVLLKQGWSTLQLNALFGTLTFAGLTVGAMMAGIIGDRYGRRLAYQINLVVFGIASFAAAVAPDMYWLSAIRFMMGLGIGAEAVISYGMLGEFVPPGFRGRMLAFLSVFGNSAVFVGSLVNLWVIPHLGWRYVFVIAGILAITLWIVRRSIPESPRWLETKGRIDEAEVVLQRIERSVARGGELPSYAHEVPAPTPQVSIGVLFTPPILVRTLVGSAILVCIGFSIYGLINWLPTFFIQQGFDIVKSLTWTTVITLGGPVGSLLGVAVSDRVGRRPAIIASCVVTAVCGLIYQQVDSAFALMGVGFLLVCSIYVLVAVGQGAYVPELFSTSYRLRGTGVCMTAGRLASAGCQFFILWLFTKGGVLMVVGSVVAAQLLLAFAVWAIRIETRGKRLEDLDSGVPGAPTTERSHSYSSGQ

SEQ ID NO: 23726 - protein, 467 aa, Burkholderia fungorum
MRTIDNTMGDRSSAGVSGPVTRGSIIARLERLPRNAMQVRARILIGLATFFDGFDVIAIAATLPILIAKWHLTPWEIGFLIGSGSVGQLIGAFVFPWYAERGGRVKAIALSSGIIGITSIACGFAPTFAAFVVLRVIQGLGLGGELPVAATYINEISRAHGRGRFVLLYEIVFPVGLLASNALGAWIVPRFGWQAMYFIGGMPLILFFVLRKLVPESPRWLAERERMADADTAVHAFERAVKGPLPPVTHSAEFEAMANRHPKRRMSDLFGPAYLKRTLAVAMLWITCGFIQYGLSTWLPTIYRTIYHAPLQLALNLAVAASVLGVVGSLTCALLVDKVGRKPIINLSFVACALSLLLAGVFHDSSVYVVATFCAFSLGFLACGFITAYVYTPELYPTSIRAMGCGVGGAWLKVAAIFAPAIVSKTMIGGNLQVAFYILAAVPFLAAVTVHFLGIETKGKVLEQLEA

SEQ ID NO: 23727 - protein, 470 aa, Burkholderia fungorum
MQNEATIGYRLDSLPLSGYHWRLLGLIAAGMYFDSFDIYIAGTVLAAMIHSGESTLKLNAMFVSVTFVGMMSGAWLSGVLGDRFGRRFCYQFNLGIYGFASIAAALAPSMYWLIFFRLVMGIGMGAEIVVGYGTLSEFIPAAWRGRFGTILNLIINTSLFLSTFLGWLIVPHYGWRWMFAIAGCGALFVWFLRKSMPESPRWLASRNRTDEADQVVSTIEKACGVDSATAIAAAAQQPRRAAPGNGRLGDLFTRRLLTRTITGITVLVALFIVNYAFVSWIPTFLVKQGHSVSNSLGLTSVMFAGGPVGSLIAFVLAERVGRKWGIVLFSLICAAFGAAYPFAQSEVMITALGFAITCCIYVLSSFSVATYVPELFPTELRLRGSGVSNTAGRAVSIAVPYVVAWAFTGFGIAGVLTLIVGTLLVQALIVGVLGTETRKRSLESIAAEVSDTTDASGQSVNARAASATEP

SEQ ID NO: 23728 - protein, 411 aa, Burkholderia fungorum
  unsure (1)..(411): unsure at all Xaa locations
MAACFSTXFEVYVAGGVVGFLVKTGWANMHSAAMFVSASVAGMALGTWLAGVLGDRFGRRFTYQFNLLLFGLASFAAAVVSSMDQLIVARFVMGIGLGAEVVVSYGTLVEYIPPAHRGRWSSGLSLCGNAALFVAALVGYFVIPDLGWRWLFGGVGVAALIIWYMRKAVPESPRWLESQGRFEEADRILDDIEQELAYVGQPGEAAVPAYAVVPDLPRRMLVPRFIIGIMMSVAGNAAFYGLIVWLPTFFFRQGFTVGSSLGYSMVMSAGGPAGALVGMAIADRVRRKRAIIVLSIVAALLGLVYPLCKTPLSVLVTGFLLVSALYAFVAVAWASYLPELFPTRIRLRASAVCNVTGRLAAIAMPFAVVQLYAKFGVFGVVGALGGILLAQAAVIALLGIDTNNVSLEELT

SEQ ID NO: 23729 - protein, 474 aa, Burkholderia fungorum
MSTHLRTSVAARLERLPDSRYLRTAVILISLGTFWDSYMLFSVGPISAHFFAYLGQPHLATELPLALFLGTFVGAVCLSTVADTIGRRAAFTLDLCTLAVGALVAAFSPNATVLLIALFVAGIGTGAELPLSTTYVQELSPAKARGKKSSFALTIGFFGGTVGGFASLLLVPLTNLPIQGFRIALLLAALGGFSSLLLRIRLPESPRWLERVGRHEEADRVVEEIERRVMRDTGLTALPPVPAGSHDVASGASPLRILISRAYLRRTISAGAIELLQGFGAYGFATFVPFFLYSRGYSVIHALAYTAIIQISYPTGCLISAYITDRIQRKWGMALAYTINVVFGLCFLLVDSTFLIVLFGFLTETMIFINGPLLHTYEAEIYPTGVRARGAGICFALSRLGGFLAPIVASILLAGGANGGWLIAIGAAAWFGCALVAAFVAVDTTNISLEDLEAKVGDASEADAAAGYGMVKKR

SEQ ID NO: 23730 - protein, 223 aa, Bacillus subtilis
MKNTPTQLEPNVPVTRSHSMGFVILISCAAGLGGLLYGYDTAVISGAIGFLKDLYSLSPFMEGLVISSIMIGGVVGVGISGFLSDRFGRRKILMTAALLFAISAIVSALSQDVSTLIIARIIGGLGIGMGSSLSVTYITEAAPPAIRGSLSSLYQLFTILGISATYFINLAVQRSGTYEWGVHTGWRWMLAYGMVPSVIFFLVLLVVPESPRWLAKAGKTNEA

SEQ ID NO: 23731 - protein, 457 aa, Lactobacillus brevis
MRKVSTGFVYFFGALGGLLFGYDTGVISGAILFIQKQMNLGSWQQGWVVSAVLLGAILGAAIIGPSSDRFGRRKLLLLSAIIFFVGALGSAFSPEFWTLIISRIILGMAVGAASALIPTYLAELAPSDKRGTVSSLFQLMVMTGILLAYITNYSFSGFYTGWRWMLGFAAIPAALLFLGGLILPESPRFLVKSGHLDEARHVLDTMNKHDQVAVNKEINDIQESAKIVSGGWSELFGKMVRPSLIIGIGLAIFQQVMGCNTVLYYAPTIFTDVGFGVSAALLAHIGIGIFNVIVTAIAVAIMDKIDRKKIVNIGAVGMGISLFVMSIGMKFSGGSQTAAIISVIALTVYIAFFSATWGPVMWVMIGEVFPLNIRGLGNSFASVINWTANMIVSLTFPSLLDFFGTGSLFIGYGILCFASIWFVQKKVFETRNRSLEDIEATLRAKTGEDAAELSTTK

SEQ ID NO: 23732 - protein, 442 aa, Pseudomonas putida KT2440
MRTLDVHPIIDNARFTPFHWMVMAWCGLLLIFDGYDLFIYGVVLPVIMKEWGLTPLQAGALGSYALFGMMFGALAFGSLADRIGRKKGIAICFALFSGATILNGFASNPSEFGIYRFIAGLGCGGLMPNAVALMNEYAPKRLRSTLVAIMFSGYSLGGMLSAGVGIFMLPRFGWESMFFAAAVPLLLLPVILYYLPESIGFLVRQGRIEEARTLLKRLDPDCDVQADDVLQAADRKGSGASVLELFRNGLAIRTLALWVAFFCCLLMVYALSSWLPKLMANAGYSLGSSLSFLLALNFGGMAGAILGGWLGDRYNLVKVKVAFFIAAALSISLLGVNSPMPVLYLLIFIAGATTIGTQILLYAGAAQMYGLSVRSTGLGWASGIGRNGAIVGPLLGGALMGINLPLQLNFIAFAIPGAIAALAMAVHLASGRRHAQTLAAQA

SEQ ID NO: 23733 - protein, 448 aa, Pseudomonas putida KT2440
MNQAQTNVGKSLDVQSFINQQPLSRYQWRVVLLCFLIVFLDGLDTAAMGFIAPALSQEWGIDRASLGPVMSAALIGMVFGALGSGPLADRFGRKGVLVGAVLVFGGFSLASAYATNVDQLLVLRFLTGLGLGAGMPNATTLLSEYTPERLKSLLVTSMFCGFNLGMAGGGFISAKMIPAYGWHSLLVIGGVLPLLLALVLMIWLPESARFLVVRNRGTDKVRKTLSPIAPQVVAEAGSFSVPEQKAVAARNVFAVIFSGTYGLGTVLLWLTYFMGLVIVYLLTSWLPTLMRDSGASMEQAAFIGALFQFGGVLSAVGVGWAMDRFNPHKVIGIFYLLAGVFAYAVGQSLGNITLLATLVLVAGMCVNGAQSAMPSLAARFYPTQGRATGVSWMLGIGRFGAILGAWSGATLLGLGWSFEQVLTALLVPAALATVGVVVKGLVSHADAT

SEQ ID NO: 23734 - protein, 450 aa, Pseudomonas putida KT2440
MSSLNMYTLTEESKFNRFHGLILFWCVLILIIDGYDLAVVGAALPAIMADMQIDATSAGVMAGSALFGTMLGAIFLGTLADRIGRPKMIAICVALFSVFTAAAGFTDSPLTFSIMRFIAGLGIGGVLPICTAQMGEFSPLKVRTRLVTIVFAGYSVGGILVALTGKQLIESYGWQYVFYVAVLPVVLIPFILKSMPDSIGFMLKQGRQDELKVIARRLRPDLVIKDDTQFVGNPQIISAQDKPVRSLFLEGRGYSTVMIWMAFMTGLFMVYALNSWLTKLMAMAGFSLGSALNFVIVFNLGSIFGAILGGWLSDKFSIKHVLVVFYVVGAVALTLLGYTRSTELLFVVVFIVGASTLGTQLLAYAYAGDFYPSTIRSTGVGFASGVGRVGAIVAPVLIGALVSMALPLEQNFMAIALAGLVGAVAVTMINQSRSDSAVVRKKATVAHELT

SEQ ID NO: 23735 - protein, 448 aa, Rhodococcus sp. 19070
MADNTTAWASPRHRRTVIWVVALATLAIIFDGYDLVVYGTILPTLMADPSQIGAISAQQGGALGSYALIGVMVGALFTGAFGDRLGRRKMMLINIVWFSVGMGAAAMATSITSFGILRFFTGIGVGGLVATAGAVVAEFAPPGKRNLFNAIVYSGVPAGGVLASLLAIVLRDTIGWRGLFWIGALPLVILLPLALVKLPESPMWLQARGRTDEAAAVCDKFGLPLPTIAPAPAEKVGFAALATRRYAWGTTLLGLMSFAGLLLTYGLNTWLPKIMADAGYNAKGSLAFLLVLNGGAIIGGLLASRIADGRGPQPVIATTFGLAGLALILLTFGFPLPVLLTAVAIAGVGTIGTQVLIYGFVSNYYETAARGAGVAWCAGFGRLGGIFGPIIGGLLIGAGLSNDVSFYIFAGIAVAGALVTVFVPIRRGAQYVARTPEAAAASPTTVEV

SEQ ID NO: 23736 - protein, 576 aa, Anopheles gambiae str. PEST
NSNPSNRTGQFRANPSCTQNAHCSYNNFGKAQAKSQSKMSYGDISYGLQKQVSVMSMNLSAKLDDLQRGDRHLETTVALCEIRTQLQELTKSVESCQTEVSEVKRDMVAIKHELDTVQQVKEEIEELREYVDRLEEHTHRRKLRLLEQGLTFFLTYAIFAAVLGMLQFGYNTGVINAPEVNIENFMKDVYKDRYGEDISEEFIQQLYSVAVSIFAIGGMLGGFSGGWMANRFGRKGGLLLNNVLGISGACLMGFTKMSHSYEMLFLGRFIIGVNCGLNTSLVPMYISEIAPLNLRGGLGTVNQLAVTVGLLLSQVLGIEQILGTNDGWPVLLGLAICPAILQLLLLPICPESPRYLLITKQWEEEARKALRRLRASNQVEEDIEEMRAEERAQQSESSISTIELICSPTLRAPLIIGIVMQLSQQFSGINAVFYYSTSLFMSSGLTEESAKFATIGIGAIMEMIDWMSYLSVVSTLAFVVFFAVGPGSIPWMITAELFSQGPRPSAMAIAVLVNWMANFVVGIGFPSLKTALENYTFLPFSVFLAIFWIFTYKKVPETKNKTFEEILALFRHGNGR

SEQ ID NO: 23737 - protein, 461 aa, Agrobacterium tumefaciens str. C58 (Cereon)
MNIMQPLRADATAVADPQADISARLERLPITREVFWARNIVGAATFFDGYTVIAIAYAMPVLVREWGLTPSQTGMILSMGYLGQLIGAILFGWLAERIGRLKVLLFTILLFVSMDVACLFAAGAGMMMAFRFVQGIGTGGEVPVASAYINELIGSKGRGRFFLLYEVMFLLGLVGAGLIGYFMVPLYGWKAMFIVGLVPAMLMIPLRWFLKESPRWLAATGRYDEANVIVKRMEESARAAGKALPEPRIIATPAKRVSDWRELFQGIYLKRTLSIWAMWFCAYMVANGTITWLPTLYRQTFNLPLETSILYGFMTSAAGVVAAVICALLIDKVGRKRWYAGALLLAPVPLAILAWLGATSPMQVLIFAGLAYAIVQTVTFSLYLYSAEIYPTRMRAIGTGAGSAWLRLGSSAGPMLVGFVMSSMGIQYVFATFAFILIIGAVVTMLFAVETKGKVLEELSP

SEQ ID NO: 23738 - protein, 388 aa, Magnetospirillum magnetotacticum
PPHSLPRGSLSLLLTSVFAGGAVGAPVFGLLGDRFGRRRALQASLGLMAIGSIAAAMSSGLTSLTIARAVSGFAIGGFPPLVATYLAEVMPPRRRGAMLMTCAGIGFLGGSAVISLIQVLSPAAPLGIEPWRWALIVGAVLSALAAALFAFVSESPRWLASTGRAREADRACREFEQAARMRPAAAPAGPFPEPPHSGQADARPPLARRSATRRTALFVALYALAPWATLGFPLLSAVVLLEKGYRIDQSLLFAALSMLGPPLGTLLAALVIDRLERRACLAALAGTMAILGTVFAASDAFLTLVLVGIAFNTAAASYGAILSIYATEVLATRLRASVLTWAWAGGRVASALAPFVFCLPWPPTVPRAVNRVRASPAGGASGGPRVSA

SEQ ID NO: 23739 - protein, 459 aa, Shigella flexneri 2a str. 2457T
MEQITKPHCGARLDRLPDCRWHSSMFAIVAFGLLVCWSNAVGGLILAQLKALGWTDNSTTATFSAITTAGMFLGALVGGIIGDKTGRRNAFILYEAIHIASMVVGAFSPNMDFLIACRFVMDVGLGALLVTLFAGFTEYMPGRNRGTWSSRVSFIGNWSYPLCSLIAMGLTPLISAEWNWRVQLLIPAILSLIATALAWRYFPESPRWLESRGRYQEAEKVMRSIEEGVIRQTGKPLPPVVIADDGKAPQAVPYSALLTGVLLKRVILGSCVLITMNVVQYTLINWLPTIFMTQGINLKDSIVLNTMSMFGAPFGIFIAMLVMDKIPRKTMGVGLLILIAVLGYIYSLQTSMLLITLIGFFLITFVYMYVCYASAVYVPEIWPTEAKLRGSGLANAVGRISGIAAPYAVAVLLSSYGVTGVFILLGAVSNIVAIAIATIGIETKGVSVESLSIDAVANK

SEQ ID NO: 23740 - protein, 225 aa, Microbulbifer degradans 2-40
MATISVSTRVALCVALGGFIFGFDASVISGVVPFISKLFGLSDWQIGAVVSAPTLGAVFSAMGVSTLADRFGRKPILISIAAIYAISAAYSALAPNFESLVIARFIGGLGFGSLVLAPIYISEIAPPHQRGRLVSFNQLNIVVGFSIAYFVNYFIVQAVSNAYSWAPPQSMVSAPWRWMLGLELLPALAYIALLFKIPESPRWLMLNNYSARATDVVKKSSQAIM

SEQ ID NO: 23741 - protein, 422 aa, Oenococcus oeni MCW
MSKPDQLNLTPGLQGVVSSSLVLGAFFGALGCGRIADKFGRKQTLRWIAALFTSSTILCALSMNFLFMSFFRFALGLSVGAASSLSPMYLAEISPEPVRTINVNKNAIFIVLGQLSAFCMNAFLGNIWGNWNPIWRIMIVSASIPAIILWINSFHIVGSPHWLLLKKRFKKARKLFSKLGFEKSTFDGIEQESKTKSKKDDDISWKSILKKPSLVYLLISGILIALIQQISGVNTVMYYGTILMEKVGMGQSGSLYANILIGLVSFVASIFGTRLIARFDHHRMLLISLFGNILFLALLGLVLRLSLFTQTITNALVLIFLALFLASHQGIVSPVTWLIMSEMFPGKIKARFMSIATATTWITNFIISLIYPLLISAVGTAVVFFIFAASNGVSALLSIFVLNAKEIQRAYRKNDLMSQESN

SEQ ID NO: 23742 - protein, 449 aa, Pseudomonas syringae pv. syringae B728a
MTLSAGSPAPSTLDVQAFINAQPLSGYQWRVVALCFLIVFLDGLDTAAMGFIAPALSQDWGIDRASLGPVMSAALIGMVFGALGSGPLADRFGRKVVLVVAVLLFGLFSLASAYSSNIDQLLVLRLLTGLGLGAAMPNATTLLSEYTPERLKSLLVTSMFCGFNLGMACGGFVSAKLIPSMGWHSLLMLGGILPLLLGLVLMVWLPESARFLVVRNRGAERIRKVLAPIAPKALAGITDFSVPEQKTVSSRNVLKVIFSGTYSAGTLLLWLTYFMGLVIVYLLTSWLPTLMRDSGASMEQSAFIGALFQFGGVLSAVGVGWAMDRYNPHKVIGCAYALAGVFAWLVGQSLGNVALLATLVLLAGMCINGAQSAMPSLAARFYPTQGRATGVSWMLGIGRFGAILGAWAGATLLGLGWTFEQVLTALVIPAALAAIAVLIKGWVSHSDAT

SEQ ID NO: 23743 - protein, 459 aa, Pseudomonas fluorescens PfO-1
MDTGNFSAADRLERLPVSGYHRIIFIIIALAFFFDSMDLAMMTFLLGSIKAEFGLSSAQAGLLASSSFFGMVLGASLSGLLADRFGRKPVFQWSIVLWGLASYLCSTAQTVESLTLFRILLGIGMGMEFPIAQSMLSELIPAQRRGRYIALMDGFWPLGFVAAGVLSYFLLPLIGWRDIFLVLAVPAVFVLAIRFFIPESPRWLEQAGKHDEADKVLRGIEARVQASLGGAALPEPVRLPRSVTPPGHFLSALKQIWSPLYRQRTTMIWSLWFFALLGFYGLTSWLSALLQQSGFAVTQSVYYTVLISLGGIPGFLMAAWLVERWGRKPVCIVTLLGGGVMAFLYGQSAVFGGNVALLIGTGLLMQFFLFGMWAVLYTYTPELYPTSARATGSGFASAIGRVGSLLGPLVTGLVFPITGQGGVFALGALCFTIAAGVVWLFGMETRGKTLEELTEAVVR

SEQ ID NO: 23744 - protein, 469 aa, Pseudomonas fluorescens PfO-1
MTVPLSGRPPFDCVFLRGIKIMNQPQSAVGHCLDVQSFINAQPISRYQWRVVILCFLIVFLDGLDTAAMGFIAPALSQDWGIDRASLGPVMSAALIGMVFGALGSGPLADRFGRKVVLVGAVFLFGAFSLASAYATNVDQLLVLRFLTGLGLGAGMPNATTLLSEYTPERKKSLLVTSMFCGFNLGMAGGGFISAKLIPAFGWHSLLLIGGILPLILTVVLLLWLPESARYLVVRNRGTDKVRKTLAPIDPAIVAQAASFSVPEQKTVKARNVFAVIFSGTYSVGTLLLWLTYFMGLVIVYLLTSWLPTLMRDSGASMEQAAFIGALFQFGGVLSAVGVGWAMDRFNPHKVIGIFYLLAGVFAYAVGQSLGNITLLATLVLVAGMCVNGAQSAMPSLAARFYPTQGRATGVSWMLGIGRFGAILGAWMGATLLGLGWNFEQVLTALVIPAGLATAAVVIKGLVSHADAT

SEQ ID NO: 23745 - protein, 446 aa, Pseudomonas fluorescens PfO-1
MRVIDVNQFIDKARFSRFHWGVVTLCALLLIFDGYDLFIFGVVLPAIMREWQLTPIQAGALGSYALFGMMFGALAFGSLADRIGRKKSIAICFTLFSSATLINGFASNPTEFGICRFLAGLGCGGLMPNAVALMSEFAPRRLRSTLVAVMFSGYSLGGVLAASVGIYMLPLFGWQSMFFAAAVPLLLLPMILGFLPESIGFLIRAGKEGQARRILSKVDPASAPSDSDTLRQADSEGRGVILLALFRERRASRTLCLWVAFFCCLLMVYALSSWLPKLMANAGYSLGSSLTFLLALNFGGMAGAIFGGWLGDRYNLGKVTVMFFLTAALSISLLGFKSSTALLYLLISVAGATTIGTQILLYAATAQFYGMSIRSTGLGWASGIGRNGAILGPLLGGALLGIGLPLPLNFVAFAVPGAIAAIAMALFTLVGKRSVADSSVLMAAKP

SEQ ID NO: 23746 - protein, 477 aa, Pseudomonas fluorescens PfO-1
MDQPMTAHAPAAQRDGIDPIRAAQISARIDRLPAVATIWRLVALLSIGGFFELYDLFQTAYISPGLIRDGIFAIGNQGVFGFSDQAAFASATFLGLFLGASLLSPMADRFGRRAIFTFALVWYTVATVLMGVQSSALGIICMRFLVGIGLGIELVTIDAYLSELVPKRMRSSAFAFAFFVQFLSVPAVALMSWWLVPQAPFGISGWRWVVLASAVFALFIWWLRKRLPESPRWLAQHGRFDEANRILDGIEARCEKDHRQPLDAPEAVAVDVEGKGRFADIWQPPYRRRALMLIVFHIFQAIGFFGFGNWLPALLSGQGVSVTHSLMYAFIITLAYPLGPLLFVKFANRFENKWQIVGSALGAMTFGTLFALQTSAVGLIFCGVMITFCNAWLSFSYHSYQSELFPTNIRARAVGFCYSFSRLSTVFSSLLIGLFLDHFGTPGVLAFIVASMLIVMLTIGCFGPRTRNLALENIAHR

SEQ ID NO: 23747 - protein, 442 aa, Pseudomonas aeruginosa PAO1
MTNPTTSIEDVPLNAFHRLLTLRSGGGSFVDGYVLSIIGVAMLQMTAALQLSSFWQGMIAASALVGIFFGGFLGGWLTDRLGRRRLFFVGPSLFVLASLAQYGVDSAAALFVLRFLIGVAVGIEYPVATALLVEFLPKKYRGPRLATLTILWFAGAAFAYLVGDLILRSGGEDAWRLVLASTAAIGAVLFLLRIGTPESPRWLLSKGRDADAERVIRQVYGEAFSLENLPEQALERKVTIWHLLYAGYGKRMLFVTLFWTCSVIPVFAVYAFAPKVLLALNLKGDWASYGSVAITLLFVIGCIIATRLINRIGRRCMLLHSFLWSGLALLGLGVFHAGSEATILGLFGAYALFIGGAQVLQLVYPNELFPTEIRAFAVGVGTSLSRVGAAVGTYLVPLSLETLGTAQTMYAAALVTLLGLLVTWALAPETRSLNLQQAASLT

SEQ ID NO: 23748 - protein, 455 aa, Pseudomonas aeruginosa PAO1
MPDAPASAAERLERLPLSPYHRLVFVIIALAFFFDSMDLAMMTFLLGSIKAEFGLDSAQAGLLASSSFFGMVIGAALSGMLADRFGRKPVFQASIVLWGLASYLCSTAGDLDSLTFYRVLLGIGMGMEFPIAQSLLSEMIPASRRGKYIALMDGFWPLGFVAAGCLSYFLLPLTGWRSIFLVLALPAVFVLAIRFLIPESPRWLEQAGRREQADRVLRDIEARVMRSLGLTELPPPLRQPQRERSRPGFFSAFAELWSPAYRRRTLTVWGLWFFALLGFYGLTSWLSALLQQSGFAVTQSVYYTVLISLAGIPGFLCAAWLVESWGRKPSCVLMLLGGGAMAYAYGQTAVFGGSLALLIGFGLAMQFFLFGMWAVLYTYTPELYPTSARATGSGFASAVGRIGSLLGPLVTGLVLPLTGQGGVFTLGALCFGVAALVVWAFGIETRGRTLEELAG

SEQ ID NO: 23749 - protein, 448 aa, Pseudomonas aeruginosa PAO1
MNSPSLPAVERLDVQAFINAQPLSPYQWRIVLLCFLIVFLDGLDTAAMGFIAPALTQDWGIDRASLGPVMSAALIGMVFGALGSGPLADRYGRKLVLVAAVFLFGLFSLASAYSTNVEQLLALRFLTGLGLGAAMPNATTLLSEYTPERLKSLLVTSMFCGFNLGMACGGFVSAKLIPLFGWHSLLLLGGLLPLVLAVVLLFRLPESARYLVVRNRGSERVRQVLAPIAPAQVALARSFHVPEQQTVQARNVFAVIFSGTYSAGTLLLWLTYFMGLVIVYLLTSWLPTLMRDSGASLEQAAFIGALFQFGGVLSAVAVGWAMDRFNPHKVIGLFYLLAGVFAWCVGQSLGQVTLLATLVLLAGMCINGAQSAMPSLAARFYPTQGRATGVSWMLGIGRFGAILGAWIGATLLGLGWNFEQVLTALVLPAALATAAVLLKGLVSHADAG

SEQ ID NO: 23750 - protein, 446 aa, Pseudomonas aeruginosa PAO1
MNRQSAAAVIDAARFNRTHWLILGWGCFIMLFDGYDMVIYGSVVPRLMQEWQLSPVQAGTLGSCALFGMLFGGTLLAPLADRFGRRRLVIATTLLASLAAFLTGHARDPLELGAGRFFTGLALGALVPSAINLISEFAPAGRRSTLVTVMSAFYSVGAVLSALLAIAMIPAWGWQSVFYVAVLPVLAVPLMLRWLPESAAFLELKGRRAELDALLRKVDPDYRPGAERANAVAAEAPSGRVAQLFEGRQAVGTLLLWVAFAMCMLMSYGLNTWLPKLMAGGGYALGSSLAFLVTLNVGATLGALFGGWLADRLGAGRTLVLFFALAAASLAALGLGPGPWLLNGLLVVAGATTIGTLAVIHAYAAQFYPAWVRSTGVGWAAGVGRLGAIAGPMLGGSLLALELPFQQNFLAFAAPGVIGALAIACIHLRPRVPAEASVDATAKKPL

SEQ ID NO: 23751 - protein, 449 aa, Pseudomonas syringae pv. tomato str. DC3000
MTLTASGPATGTLDVQAFINAQPLSGYQWRIVALCFLIVFLDGLDTAAMGFIAPALSQDWGIDRASLGPVMSAALIGMVFGALGSGPLADRFGRKVVLVVAVFLFGIFSLASAYSSNIDQLLVLRLLTGLGLGAAMPNATTLLSEYTPERLKSLLVTSMFCGFNLGMACGGFVSAKLIPSMGWHSLLMLGGILPLVLAVVLMVWLPESARFLVVRNRGAEQIRKVLAPIAPKAVAGVTAFTVPEQKTVSSRNVLKVIFSGTYSAGTLLLWLTYFMGLVIVYLLTSWLPTLMRDSGASMEQSAFIGALFQFGGVLSAVGVGWAMDRYNPHKVIGFAYALAGVFAYLVGQSLGNVAVLATLVLLAGMCINGAQSAMPSLAARFYPTQGRATGVSWMLGIGRFGAILGAWAGATLLGLGWNFEQVLTALVIPAALAALAILIKGWVSHSDAT

SEQ ID NO: 23752 - protein, 481 aa, Bradyrhizobium japonicum USDA 110
MRSAHLGEDTMSVVGIDTGFELGAAPSVPDEISRRLEAMPGSPYVWRLVILLSLGGCFEIYDLFLTGYIAPGLSRSGLLSTTTQAFFGFAGIGAFVAATFAGLFVGTFFLGFLADRFGRRAIFTYALLGYTAASVIMACQTSPEGLLFWRFLAGIGIGVEVITIDAYITELVPSRMRGRAFAVNQSIMFVAVPVVAFLAWWLVPLAPYGVEGWRWVVLIGAAASMIIWVLRLFLPESPLWLARHGRNEEALRILTTLEAASGGAGSRPATSPARQAVRSTTNVSFADLFRPPYLSLVVLFMVFNLCQAFGFYGFANWVPTLLVEKGINVTKSLQYSFIVAFAYPIAPLLASSFADKFERRWIIAGACVAIIVFGMAFAQLTEPALLIVCGVLLTACNTTMSYAYHAYQTEVFPTQIRARASGLVYSMSRLSATFSGFIVAYMLKEGGVTGVFGLITAAMLIVVIAMALFGPNVRGKPLDAV

SEQ ID NO: 23753 - protein, 454 aa, Bradyrhizobium japonicum USDA 110
MSTMAMPQPTASEAAVRYLITNYSPKGNKVGWLMMASILVEAWDLYSIAFVLIFIKEQYNPDPLMLGLAAAGTQGGALIGALLGGWLSDKIGRRVMFLVTMVLFIVLALAQAFVPTVGWLVVIRFLLGIPLGSDISTGYTYIMESMAKGEREVMGNRWQFMFAVGEVLTIGVIVIFLLIDMQHEMLWRVTLGLGAVPALIILIMRHDVPETAVWLVQKGRYREAKQVAREMFNDNLDMLPDQDVVVPKTSTRAFLADLKKDPIRWRATVYGWIACFTQASEFSTFAFYLPVLFVMVGVSSVLGINLVTMALFSFAALSGWVGPLLTPKIGHRGIAIAGFSIVMASLLVAAFALYTDNKILLPFAAAAMLWGHYWDASNCMTIPTMVAKPKYRGTASGFAYMFVKLPSFLAIFLFPTVFAAIGQANATLMVAIFPLIGLLAAIFILPEVYGYEND

SEQ ID NO: 23754 - protein, 517 aa, Bradyrhizobium japonicum USDA 110
MIGSPLATSCEPGSLPLVRPSNAMELQQSQALNYGPAVSAVATDRIIETSIPSRLDALPWSGFHTRVVLALGITWILDGLEVTLAGALSGALKQSPSLQFSNLDLGIANSAYLAGAVLGALGFGWLTDRIGRKKLFFITLALYLSATAATALSWDIASYALFRFLTGAGIGGEYTAINSTIQELVPARYRGWTDLVINGSFWIGAAMGAVAAIVLLDPALIGPDLGWRLAYLIGASIGLVVLLMRMWIPESPRWLMIHGRPDQAHAIVDEIERSVIGHDQDASDRRFTRIRLKMRDHTPIREVMHTLFTVYRQRALVGLVLMGAQAFFYNAIFFTFALVLTDFYGISADHVGWYLLPFAAGNFLGPLLLGRLFDTLGRRAMIMFTYGASGLLLALSGYLFSIGALSAQGQTIAWMVIFFFASPAASAAYLTVSETFPLEVRALAIAVFYAVGTGIGGVIGPALFGALIDTGSRTSVFAGYLLGAFLMIAAAIVAWRYAVSAERKSLEQIARPLAFME

SEQ ID NO: 23755 - protein, 518 aa, Bradyrhizobium japonicum USDA 110
MRHRKLQRPFQHQERDGRDPRAAVRLVSRHGQSEATELAKLQAADRPEKVGRINGDNSQGRASMSTSVNAGGRLDRLPVGPFHRRIMLLIGIGMFFDGFDIYIAGTVLSVTLKTGFSTLAQNAAFISATFVGMMLGSFGTGFLGDRYGRRFTYQFNLLLFGIASLAAAFSPNMAFLIACRFVMGVGLGAENVVGYSTMTEFVPARTRGKWLGFTAVCVVTGLPVALLVASVLVPQFGWRSMFVLGGVGALVVWYMRKSLPESPRWLEAVGRTAEAETLMQAIEKEAAQGQPLPPPAATAPAPVSPDLGTLFTAPLLSRMIVGAVCLITINTLLYGFVTWLPVFFVKQGLSIATSFGYSLLMAIGAPVGAAIGALTADRWGRKPTIIGASLIAVALGVLYPMISDPILLPAVGFALTVPIYVLVALLFGIYIPELFPTEVRLRASGIVNTLGRGATIVTPFLVVSLFETRGVAGVMALMIGLLVVQIITVWALGIEPRHRSLEELKAEESASPVLKEAS

SEQ ID NO: 23756 - protein, 436 aa, Bacillus cereus ATCC 14579
MNIMQPSAPPHLESTETIFPSSITKLVVFICWLAILADGYDLGIYGAVLPKLLEDKSWALSPAHAGTIASYALLGMFIGAILVGTITDLIGRKWTLICCLALFSITMGLAAIAPSPELFGLSRFIGGIGLGGVIPTASALTVEYSPKKRQSFIYALMFTGYPLGIVLGAILSMLMLEDFGWRIMFGIGMIPLLLIPFIIRYLPESIQFLLSRNRQEEVNQILNRFQIEFHVKDKTHQDPSTIRKKNGFFTLFSKEYIKATLLFWITYIMGMFLIYGLNTWLPQMMRQAGYPLGSSLSFLLMLNITAAIGALFAGAIADRIGAKIVISISYLMAAICIGLLTIKPSVTIIYLLIGLAGIGSVGITQILNAYVTQYFPSHIRATSLGWGLGLGRVGAIAGPILVGIIMTMQYDLAWNFYLFSFAGLIAAISVFFIPTK

SEQ ID NO: 23757 - protein, 488 aa, Sulfolobus solfataricus
MYKARKLTFIRYFYELTGVSTSMSSKLDEYLARIDRLPTWGLSYAVLWALGIGYFATLYDAVSNLGYALPFIPFINATQASIIVSVGLAGYIAGSIGFGVASDRIGRRPILITTFALLGIGSLGMGLATNYFMLFIFRLLEGIGIGAALNLAMVYVAEFSPSMKRGKYANWIFISGWTAVGVGTVAAAFIVTINPTVGWRIIFLLPAVLSLMTTVVLTILSPESVRILVKKGKVQEVEKIVNKMEEISMRRARMESLPQPKIIHYEETPSSSQLKILRESKYLKRLISLTVFWFFIYFIQYTSTGLGPTFVKVVIGFSTAQYAEYIRLSGFAAIGATIVSFILLSVVEKTDRRLLTQIGGIGFLVSSFVSTYLLLNKELIVWFIAYFLLEFVVNPPYLAGYLMSSEAFPTAARSTAFAITDGIGHLGGVIGPLLLFPLIRIIGPLPAWVVLGLPVPFAAALLWFTIPKTVKVRLEEVNEAYREGTAQT

SEQ ID NO: 23758 - protein, 566 aa, Kluyveromyces lactis
MSSNLSEKAVDQQKEFGLLKSTSSVDSVHEVEAGVKVGEDDDNYFFSEDQILTQIKVYEDEIANTPVTKTLRQRMRRMEFCEVNFSNKTYMVIMLGFFASFAGILSGVDQSTISGASYGMKASLKLTSDEDSLISSLMPLGAVGGSILLTPLSEYFGRKVALVISCIFYTIGGILCAAAQDVHTMYAGRFLIGVGVGIEGGGVGVYIAESVPSTVRGSLVSLYQFNIALGELVGYVIGVIFFDVKGGWRYMLGSSLVFSTILFVGLFFLPESPRWLIHKGYDVEAYKVWRRLRDTSDLGNKREFLEMKHAAEQDRQLKEQESRFKSMFDLILIPRNRRALLYSIMMVSLGQLTGINAIMYYMSTLMGQIGFSPKQAVAMSMVGGAALLIGTIPAILYMDKFGRRPWSMTIIGFSVGLVLVGVGYQIDLNTNLAAAEGVYLTGQILYNIFFGTYATLTWVVPSESFSLATRSIGMTICSAFLYLWAFTVTYNFNKMKDAFTYTGLTLGFYGGIAIVIGIPYQLLFMPETKDKTLEEIDDIFEMPTRQLVKQNLKNLKDYVSGNRKSI

SEQ ID NO: 23759 - protein, 587 aa, Kluyveromyces lactis
MADHSSSSSSLQKKPINTIEHKDTLGNDRDHKEALNSDNDNTSGLKINGVPIEDAREEVLLPGYLSKQYYKLYGLCFITYLCATMQGYDGALMGSIYTEDAYLKYYHLDINSSSGTGLVFSIFNVGQICGAFFVPLMDWKGRKPAILIGCLGVVIGAIISSLTTTKSALIGGRWFVAFFATIANAAAPTYCAEVAPAHLRGKVAGLYNTLWSVGSIVAAFSTYGTNKNFPNSSKAFKIPLYLQMMFPGLVCIFGWLIPESPRWLVGVGREEEAREFIIKYHLNGDRTHPLLDMEMAEIIESFHGTDLSNPLEMLDVRSLFRTRSDRYRAMLVILMAWFGQFSGNNVCSYYLPTMLRNVGMKSVSLNVLMNGVYSIVTWISSICGAFFIDKIGRREGFLGSISGAALALTGLSICTARYEKTKKKSASNGALVFIYLFGGIFSFAFTPMQSMYSTEVSTNLTRSKAQLLNFVVSGVAQFVNQFATPKAMKNIKYWFYVFYVFFDIFEFIVIYFFFVETKGRSLEELEVVFEAPNPRKASVDQAFLAQVRATLVQRNDVRVANAQNLKEQEPLKSDADHVEKLSEAESV

SEQ ID NO: 23760 - protein, 528 aa, Kluyveromyces lactis
MSTNNRLLPHGRADELNNLENASSNNKGVTFTPHLLLSMLVACLGSLQYGYHMGELNAPEDYITCKAELNPGYADSFLGRLGLAQCIPLTDSQFGLITSVFSVGGLIGSLVAGPLADSYGRKPISYWNCSVGILGAVCLFSSNNYLGMLFGRLLAGISCGSLIVVTPLFINEMSPVHLKGSLGSMNQVSINCGILVTQSLAMLWANMLQWRWILLFGGLISLLNFGLLFRINESPRWLVSKGNMTDAEDVLSQLRGNSRQESRQEIDGWLQGSQPVRTFSDLEAHTNSQMNLGSNLNLERPSSTRSSLRDSESITVVEYWKDPKYKYPRRVITTILMAQQFCGINSIVFYGVKVIKKAFPDTAIIINFAISIVNVLMTFFSSPLVDHWGRKPLLISSSTLMSICSFMICFGIVGNAPMILVIFVILYITAFAGGLGPIPFLIISELSHPETVGVAQSYGTTMNWIATFMVGYGFPALNSVMDGYVFLLFSAVAICFSFYVYRFVPETKGKLDYTDIWKSHDPRIAYTQ

SEQ ID NO: 23761 - protein, 276 aa, Gossypium raimondii
WLFRKGREEEAKVILRKIYPADDVEKEIQDLKESVEAEIREEGCAKINIMKLLKTKTVRRGLIAGVGLQVFQQFVGINTVMYYSPTIVQLAGFASNKTALLLSLVTAGLNALGSIVSIYFIDRTGRKKLLLISLFGEAISLGLLAGVFHETTSHTPMVSRIQTSHFSNYTCPDYSSATNPGAWDCMKCLKALSPDCGFCASPTDKVKSHDISIFLQSLVFVFPSLIGFLLLLQLLPGACLLSNDTVKDLCHDESRLWYTRGCPSKYGWLALVGLAL

SEQ ID NO: 23762 - protein, 443 aa, Pseudomonas putida
MRTLDVHPIIDNARFTPFHWMVMAWCGLLLIFDGYDLFIYGVVLPVIMKEWGLTPLQAGALGSYALFGMMFGALAFGSLADRIGRKKGIAICFALFSVATILNGFASSPSEFGIYRFIAGLGCGGLMPNAVALMNEYAPKRLRSTLVAIMFSGYSLGGMLSAGVGIFMLPRFGWESMFFAAAVPLLLLPVILYYLPESIGFLVRKGRTEEARALLKRLDPQCDVQADDVLQAADRKAGGGASVLELFRNGLAIRTLALWLAFFCCLLMVYALSSWLPKLMANAGYSLGSSLSFLLALNFGGMAGAILGGWLGDRYNLVKVKVAFFIAAALSISLLGVNSPMPVLYLLIFIAGATTIGTQILLYAGAAQMYGLSVRSTGLGWASGIGRNGAIVGPLLGGALMGINLPLQLNFIAFAIPGAIAALAMAVHLASGRRQARAIAAQA

SEQ ID NO: 23763 - protein, 448 aa, Pseudomonas putida
MNQAQNSVGKSLDVQSFINQQPLSRYQWRVVLLCFLIVFLDGLDTAAMGFIAPALSQEWGIDRASLGPVMSAALIGMVFGALGSGPLADRFGRKGVLVGAVLVFGGFSLASAYATNVDQLLVLRFLTGLGLGAGMPNATTLLSEYTPERLKSLLVTSMFCGFNLGMAGGGFISAKMIPAYGWHSLLVIGGVLPLLLALVLMVWLPESARFLVVRNRGTDKIRKTLSPIAPQVVAEAGSFSVPEQKAVAARSVFAVIFSGTYGLGTMLLWLTYFMGLVIVYLLTSWLPTLMRDSGASMEQAAFIGALFQFGGVLSAVGVGWAMDRYNPHKVIGIFYLLAGVFAYAVGQSLGNITVLATLVLIAGMCVNGAQSAMPSLAARFYPTQGRATGVSWMLGIGRFGAILGAWSGATLLGLGWNFEQVLTALLVPAALATVGVIVKGLVSHADAT

SEQ ID NO: 23764 - protein, 476 aa, Ralstonia solanacearum
MPATFPAAAQANAAARLERLPFSGYHKRIFIIIAIAFFFDSVDLATMTFVLGSIKKEFGLSTATAGLVASSSFFGMVIGAAVAGLLADRFGRRPVFQWSMVLWGVASYLCSTAQSVEALIAWRILLGIGMGMEFPVAQTLLSEFVPTANRGRLIALMDGFWPLGFITAGIVSYFVLPQFGWRAVFALLAVPAIFVLIVRRAVPESPRWLEHAGRNAQADTVMRGIEAKVMRSLNTTTLPPIVQHSAPQPVRRHSALREIWSAAYRRRTTMVWLLWFFALLGFYGLTSWLGALLQQAGFAVTQSVYYTVLISLGGVPGFLCAAWLVERWGRKPTCIASLLGGGAMAYLYGQSALYGGSVTLLICTGLAMQFFLFGMWAVLYTYTPEQYGTGARATGSGFASAIGRVGSLIGPYVVGVVLPVFGQGGVFTLGAISFAVAALAVWALGIETRGLALEALASEDAAAETAPYSTTADNIS

SEQ ID NO: 23765 - protein, 276 aa, Gossypium herbaceum
WLFRKGREEEAKVILRKIYSADDVEKEIQDLKESVEAEIREEGSAKINMMKLLKTKTVRRGLIAGVGLQVFQQFVGINTVMYYSPTIVQLAGFASNKTALLLSLVTAGLNALGSIVSIYFIDRTGRKKLLLISLFGVAISLGLLAGVFHETTSHSPMVSRIQTSHFSNYTCPDYSSATNPGAWDCMKCLKASSPDCGFCASPTDKVKSHDISIFLQSLVFVFPSLIGFLLLLQILPGACLLSNDTVKDLCHDESRLWYTRGCPSKYGWLALVGLAL

SEQ ID NO: 23766 - protein, 443 aa, Azotobacter vinelandii
MRNIDVNRLVDEARFNRFHWRVLCWCALLLIFDGYDLFIYGVVLPVLMKTWGLSPLEAGALGSYALFGMMFGALFFGPLADRIGRKKGIAICFLLFSGFTVLNGFVRNPLEFGVCRFVAGLGIGGLMPNVVALMNEYAPKKIRSTLVAIMFSGYSLGGMLSAGLGIYMLPRFGWEAMFQAAAVPLLLLPLILWFLPESVGYLLRQGRTEQARAILRRVDPGLALTDDDRLEMAEAKGEGAPVLQLFREGRALRTLSLWVAFFCCLLMVYALSSWLPKMMASAGYSLGSSLSFLLVLNFGAVFGAIGGGWLGDRMNLPKVLVAFFAVAALSIGLLGFKSPTPVLYALIALAGATTIGSQILLYACAAQFYSMAIRSTGLGWASGIGRNGAIVGPLLGGALVGMSLPLQMNFIAFAIPGLLAAIAMALFCLRQPAAGVAPGEALA

SEQ ID NO: 23767 - protein, 581 aa, Mesembryanthemum crystallinum
MVEGGIVKADKTEFTECFRTIGKTPYILRLAFSAGIGGLLFGYDTGVISGALLYIKEDFKEVERKTWLQETIVAMAVAGAIIGAGVGGYLNDKFGRKPAIIIADILFFIGAIIMSLAPAPWMIILGRIFVGLGVGMASMTSPLYISETSPTRIRSALVSTNGLLITGSQFLSYLINLGFTRVKGTWRWMLGVAAVPAFVQLLLMLSLPESPRWLYRKNKVVEAEAILARIYPPEEVEEEMRALKASIEYEMAEEGEIGGGSMLSKVRKAWGNKIVRRGLYAGITVQVAQQFVGINTVMYYSPTIVQLAGFASNSTALALSLVTSGLNAIGSIVSMMFVDRHGRRRLMIISMFGIITCLIVLAIGFFQAAAHAPKISHAESTHFGLNSTCPAYTTTRNPATWNCMTCLQAASECAFCTNKGNQLLPGGCVSRTDAMKVACHGEKRVYFTEGCPSKFGFLAVILLGAYIISYSPGMGTVPWIVNSEIYPLRYRGVGGGIAAVSNWTSNLIVSETFLTLTEALGAAGTFLLFAGFSAIGLVFIYLLVPETKGLPIEEVEHMLENGFKPSIFRGNKDKETKASGT

SEQ ID NO: 23768 - protein, 581 aa, Mesembryanthemum crystallinum
MVEGGVVKVDKTEFTECFRTVGKTPYIMRLAFSAGIGGLLFGYDTGVISGALLYIKEDFKEVAQKTWLQETIVAMAVAGAIVGAGLGGFLNDKFGRKPAMIVADILFLTGAIIMSVAPAPWVIIIGRIVVGLGVGMASMTAPLYISETSPAKIRGALGATNGLLITGGQFVSYLVNLGFTRVKGTWRWMLGVAAVPAAIQVVLMLTLPESPRWLYRQNKISEAEEILGRIYPPEQVKEEMDSLKTSIENEMADRKAVGEGNAFVRAKRAWDNKVVRRGLIAGISVLVAQQFVGINTVMYYSPTIIQLAGFASNSTALALSLVTSGLNAVGSIVSMMFVDRFGRRRLMIISMFAIITCLVVLSGLFYGAAQAAPKISQLESSHFGANSTCPAFASATSPDRWNCMTCLKASDCAFCSNSASEFHPGACVAQTSTMKNACLGEKRIYFTEGCPSKFGFMAIIVLGLYIITYSPGMGTVPWILNSEIYPLRYRGICGGIGAVTLWCANLIVSETFLTLTEALGSSGTFLLYAGFSLIGLIVIFLLVPETKGLPIEDIEKMLEKGFWPSLCGGNKDKDNKEEQQA

SEQ ID NO: 23769 - protein, 276 aa, Gossypium barbadense
WLFRKGREEEAKVILRKIYPADDVEKEIQDLKESVEAEIREEGCAKINMMKLLKTKTVRRGLIAGVGLQVFQQFVGINTVMYYSPTIVQLAGFASNKTALLLSLVTAGLNALGSIVSIYFIDRTGRKKLLLISLFGVAISLGLLAGVFHETTSHTPMVSRIQTSHFSNYTCPDYSSATNPGAWDCMKCLKASSPDCGFCASPTDKVKSHDISIFLQSLVFVFPSLIGFLLLLQLLPGACLLSNDTVKDLCHDESRLWYTRGCPSKYGWLALVGLAL

SEQ ID NO: 23770 - protein, 276 aa, Gossypium barbadense
WLFRKGREEEAKVILRKIYSADDVEKEIQDLKESVEAEIREEGSAKINMMKLLKTKTVRRGLIAGVGLQVFQQFVGINTVMYYSPTIVQLAGFASNKTALLLSLVTAGLNALGSIVSIYFIDRTGRKKLLLISLFGVAISLGLLAGVFHETTSHSPMVSRIQTSHFSNYTCPDYSSATNPGAWDCMKCLKASSPDCGFCASPTDKVKSHDISIFLQSLVFVFPSLIGFLLLLQLLPGACLLSNDTVKDLCHDESRLWYTRGCPSKYGWLALVGLAL

SEQ ID NO: 23771 - protein, 580 aa, Arabidopsis thaliana
MEGGIIHGGADESAFKECFSLTWKNPYVLRLAFSAGIGGLLFGYDTGVISGALLYIRDDFKSVDRNTWLQEMIVSMAVAGAIVGAAIGGWANDKLGRRSAILMADFLFLLGAIIMAAAPNPSLLVVGRVFVGLGVGMASMTAPLYISEASPAKIRGALVSTNGFLITGGQFLSYLINLAFTDVTGTWRWMLGIAGIPALLQFVLMFTLPESPRWLYRKGREEEAKAILRRIYSAEDVEQEIRALKDSVETEILEEGSSEKINMIKLCKAKTVRRGLIAGVGLQVFQQFVGINTVMYYSPTIVQLAGFASNRTALLLSLVTAGLNAFGSIISIYFIDRIGRKKLLIISLFGVIISLGILTGVFYEAATHAPAISSLETQRFNNISCPDYKSAMNTNAWDCMTCLKASSPSCGYCSSPIGKEHPGACWISDDSVKDLCHNENRLWYTRGCPSNFGWFALLGLGLYIIFFSPGMGTVPWIVNSEIYPLRFRGICGGIAATANWISNLIVAQSFLSLTEAIGTSWTFLIFGVISVIALLFVMVCVPETKGMPMEEIEKMLERRSMEFKFWKKKSKLVEKQNQSA

SEQ ID NO: 23772 - protein, 582 aa, Arabidopsis thaliana
MVEGGIAKADKTEFTECWRTTWKTPYIMRLALSAGIGGLLFGYDTGVISGALLFIKEDFDEVDKKTWLQSTIVSMAVAGAIVGAAVGGWINDKFGRRMSILIADVLFLIGAIVMAFAPAPWVIIVGRIFVGFGVGMASMTSPLYISEASPARIRGALVSTNGLLITGGQFFSYLINLAFVHTPGTWRWMLGVAGVPAIVQFVLMLSLPESPRWLYRKDRIAESRAILERIYPADEVEAEMEALKLSVEAEKADEAIIGDSFSAKLKGAFGNPVVRRGLAAGITVQVAQQFVGINTVMYYSPSIVQFAGYASNKTAMALSLITSGLNALGSIVSMMFVDRYGRRKLMIISMFGIIACLIILATVFSQAAIHAPKIDAFESRTFAPNATCSAYAPLAAENAPPSRWNCMKCLRSECGFCASGVQPYAPGACVVLSDDMKATCSSRGRTFFKDGCPSKFGFLAIVFLGLYIVVYAPGMGTVPWIVNSEIYPLRYRGLGGGIAAVSNWVSNLIVSESFLSLTHALGSSGTFLLFAGFSTIGLFFIWLLVPETKGLQFEEVEKLLEVGFKPSLLRRREKKGKEVDAA

SEQ ID NO: 23773 - protein, 580 aa, Arabidopsis thaliana
MVEEASKSEQINITEVWTTTWETPYIMRLALSAGIGGLLFGYNTGVIAGALLYIKEEFGEVDNKTWLQEIIVSMTVAGAIVGAAIGGWYNDKFGRRMSVLIADVLFLLGALVMVIAHAPWVIILGRLLVGFGVGMASMTSPLYISEMSPARIRGALVSTNGLLITGGQFLSYLINLAFVHTPGTWRWMLGVSAIPAIIQFCLMLTLPESPRWLYRNDRKAESRDILERIYPAEMVEAEIAALKESVRAETADEDIIGHTFSDKLRGALSNPVVRHGLAAGITVQVAQQFVGINTVMYYSPTILQFAGYASNKTAMALALITSGLNAVGSVVSMMFVDRYGRRKLMIISMFGIITCLVILAAVFNEASNHAPKIDKRDSRNFAKNATCPAFAPFTASRSPPSNWNCMKCLQYDCGFCSNGAQEYAPGACIVQSADMKALCHSKGRTFFKDGCPSKFGYLAIVFLGLYIIVYAPGMGTVPWIVNSEIYPLRYRGLAGGIAAVSNWMSNLVVSETFLTLTNAVGSSGTFLLFAGSSAVGLFFIWLLVPETKGLQFEEVEKLLEGGFRPSLLRPTTKENQVETP

SEQ ID NO: 23774 - protein, 491 aa, Malus x domestica
MTSILMGYDIGVMSGASIYIEKDLKVTDTQIEIMIGVIEIYSLIGSAMAGKTSDWVGRRYTIVISGAIFFIGAILMGFSTNYTFLMCGRFVAGIGVGYALTIAPVYSAEVSPTSSRGFLTSFPEVFVNIGILLGYLSNYAFSFCPLDLGWRLMLGVGAIPSVGLAVGVLAMPESPRWLVMQGRLGEAKRVLDRTSDSKEESMLRLADIKEAAGIPEECNDDIVQVSGHSHGEGVWKELLVHPTPTVRHILIAAIGFHFFQQASGIDALVLYSPRVFAKAGITSTNQLLLCTVGVGLSKTVFTLVATFFLDRVGRRPLLLTSMAGMVGALVCLGTSLTIVDQHEGVRMTWAVILCLCCVLAYVGFFSSGIGPIAWVYSSEIFPLRLRAQGCGMGVAVNRLMSGILSMTFISLYKAITMGGTFFLYAAIGTVGWIFFFTMLPETQGRTLEDMEVLFGKFHKWRKANKLLEKKKRVAHGDIGTSDPDNRAHLLA

SEQ ID NO: 23775 - protein, 482 aa, Sinorhizobium meliloti
MVPTGGSSPVIRQLESAFTKIGVTGAHKQILALVLIGCLFDSFEQNTIGVAGPILKEHWGLTGTDIGFLNTITFGSAAIGRLLSGILGDRYGRRVMLTINLLLFTIGSAACAMAPNFTMLCFARAIVGFGVGGEISTAVTMLSEFCSPKFRGTAAGLVNVGAGGFGNFLAPAFGLLIFTLFPGENSWRWLFASLALPALLVVFYRRFVPETPRFLASKNKIGEANKVLSILASGSLKPRNLVVHEYLTTDHMTDEAPEKSDWRELFRAPFIGRTIPVAIAILMSYGAQLSVLTLMPVIFVSMGYTLSGSLLYSMIIQSGSVLGAIAASMFGYYLPRKKVLTVGAALACLAAVSIVTLGTNIYLVLLFGAIFQFFVLLLNTSIWIYAPELFPTRIRAFGVALILATGSAAGSFVPTISGMLFDSYGMVGVFGLAAGMYAVFAFCIQLGPETYGRSMEDLSQPAEADQPKVAQQQGPVAVELRT

SEQ ID NO: 23776 - protein, 248 aa, Lycopersicon esculentum
TGVISGALLYIRDDFKSVGKRTWLQETIVSMAVAGAIFGAAFGGWFNDKYGRRKSILLADILFFIGAIVMAVAPAPWVIIIGRVLVGLGVGMASMTSPLYISEASPARIRGALVSTNGLLITGGQFLSYLINLAFTRTKGTWRWMLGVASIPALVQFILMLSLPESPRWLYRADKKDEARAILEKIYPAHEVEDEMKALQTSIEVEKADKEFLGDGVFSKVKSAWSNTIVRRGLYAGITVQVAQQFVG

SEQ ID NO: 23777 - protein, 534 aa, Nicotiana tabacum
FGLQNRRILQGSGDLKRNTLLASRSLRMPERSSCFGVSMDSASMGIELGRARKTVQSVFGSSAKARSHRVRASGGDIEDATPLKVQGQSSGSVLPYVGVACLGAILFGYHLGVVNGALEYLAKDLGIVENTVIQGWIVSSVLAGATVGSFTGGALADKFGRTKTFVLDAIPLAVGAFLCTTAQSVQAMIIGRLLTGIGIGISSAIVPLYISEISPTEIRGTLGTVNQLFICIGILVALVAGLPLSGNPLWWRTMFGIALIPSVLLALGMAFSPESPRWLFQQGRISEAETSIKRLYGKERVAEVMGDLEASAQGSSEPDAGWLDLFSSRYWKVVSIGAALFLFQQFAGINAVVYYSTAVFRSAGISSDVAASALVGAANVFGTMVASSLMDKQGRKSLLLVSFTGMAASMMLLSLSFTWKVLTPYSGTLAVLGTVLYVLSFSLGAGPVPALLLPEIFASRIRAKAVALSLGMHWISNFFIGLYFLSIVTKFGISTVYLGFASVCLLAVMYIVGNVVETKGRSLEDIERELSPAI

SEQ ID NO: 23778 - protein, 470 aa, Solanum tuberosum
CRSHRVRAAGEDIEDAAPLKVQGQSSGSVLPYVGVACLGAILFGYHLGVVNGALEYLAKDLGIAENTVIQGWIVSTVLAGAFVGSFTGGVLADKFGRTKTFILDAIPLSVGAFLCTTAQSVQAMIIGRLLTGIGIGISSAIVPLYISEISPTEIRGTLGTVNQLFICIGILVALVVGLPLSGNPSWWRTMFGLALIPSVLLAIGMAFSPESPRWLYQQGRISEAETSIKRLYGKEKVAEVMGDLEASARGSSEPDAGWLDLFSSRYRKVVSIGAAMFLLQQLAGINAVVYYSTAVFRSAGITSDVAASALVGAANVFGTTVASSLMDKQGRKSLLLISYTGMAASMMLLSLSFTWKVLTPYSGTLAVLGTVLYVLSFSLGAGPVPALLLPEIFASRIRAKAVALSLGVHWIMNFFIGLYFLSIVTKFGISTVYMGFALSCLVAVVYITGNVVETKGRSLEEIERELSPAI

SEQ ID NO: 23779 - protein, 544 aa, Olea europaea
MQVSTHAVKGNLCLGLQNLRPLPSSRELRENNLGFAVSELRMTKRSSCFGIGLDSIAMGARGNWPKSVYGSLAKARSVRAQAYEGDVEDVAPAKIQVKSSGTVLPYVGVACLGAILFGYHLGVVNGALEYLAKDLGIAENAVLQGWVVSTLLAGATVGSFTGGSLADKFGRTKTFLLDAIPLAVGAFLCATAQNIETMIIGRLLAGIGIGISSAIVPLYISEISPTEIRGTLGSVNQLFICIGILAALVAGLPLAGNPLWWRTMFGVAIIPSILLALGMAFSPESPRWLYQQGKISEAEVSIRKLNGKERVAEVMSDLDAAAQGSSEPEAGWFDLFSSRYWKVVSVGAALFLFQQLAGINAVVYYSTSVFRSAGITSDVAASALVGAANVFGTTIASSLMDKQGRKSLLLTSFAGMAVSMLLLSLTFTWKTLAPYAGTLAVLGTVLYVLSFSLGAGPVPALLLPEIFASRIRAKAVALSLGMHWISNFVIGLYFLSVVTKFGISTVYLGFASVCLLAVMYIAGNVVETKGRSLEEIERALTAAP

SEQ ID NO: 23780 - protein, 588 aa, Oryza sativa
MEGGVHEFDGSTFRECFSLSWRNPYVLRLAFSAGIGGLLFGYDTGVISGALLYIRDDFPSVDKNTWLQEMIVSMAVAGAIIGAAIGGWANDRYGRRTSILVADALFFAGAAVMASATGPAQLVVGRVFVGLGVGTASMTSPLYISEASPARIRGALVSTNGLLITGGQFLSYLINLAFTKAPGTWRWMLGVAAIPAVVQFFLMLFLPESPRWLYRKGREEEAEAILRKIYSAEEVEREKEELKESVEAEARERSSSEKTSLVALLMTTATVRRGLVAGVGLQVFQQLVGINTVMYYSPTIVQLAGFASNQTALALSLVTAGLNAAGSLVSIYFIDRTGRRKLLVISLAGVILSLALLSAVFHEATSHSPPVGAAETAHFHGVTCPDYSSRSSSSFWDCTRCLKAAAASAGCGFCAAGGGDKLPGACLAADATARDACRGEGREWYTRGCPSRYGWLAMAGLALYIAAFSPGMGTVPWIVNSEVYPLRHRGVCGGAAATANWVSNLAVAQSFLSLTDAIGAAWTFLIFGGLSVAALAFVLVCVPETKGLPIEEVEKMLEGRELRLRFWAKRRHHHGGDGDGGGEKTGGV

SEQ ID NO: 23781 - protein, 578 aa, Oryza sativa
AMEGGATLADKAEFKECLRLTWSQPYILQLVFSAGIGGLLFGYDTGVISGALLYIRDDFTAVEKSTVLRETIVSMAVAGAIVGAGFGGWMNDKFGRKPSILIADSLFLAGALIMALAPTPFVIIIGRIFVGLGVGMASMTAPLYISEASPARIRGALVSTNGLLITGGQFMAYLINLAFTKVKGTWRWMLGIAGLPAFIQFILMCMLPESPRWLYRQDRKEEAEAILRKIYPAAEVEEEIDSMRRSIEHEKQLEGSIGEQSLVGKLTKALSSKVVRRGLMAGVIAQVAQQFVGINTVMYYSPTIVQLAGFASNNTAMALSLITSGLNAIGSIVSMFFVDRAGRRRLMIISLVGIVLWLAVLGGTFLGAAHHAPPVSDLETRVFANQTCPEYSPSARWNCMNCLKAQSTCGFCAHGGNKLLPGACLAAGEASRRTCHAGNREFYTEGCPNNFGWLALVALGAYIVSYSPGMGTVPWIVNSEIYPLRFRGVCGGIAAVANWVSNLIVTQTFLSLTKALGTSATFFLFCAVSFFALVVVFFTVPETKGLQFEEVEKMLGEKDYKPWKRYRPDVSSKGRDIG

SEQ ID NO: 23782 - protein, 515 aa, Oryza sativa
  unsure (1)..(515): unsure at all Xaa locations
XSXRSDLATVVLRVSAGVISGALLYIRDDFPSVDKNTWLQEMIVSMAVAGAIIGAAIGGWANDRYGRRTSILVADALFFAGAAVMASATGPAQLVVGRVFVGLGVGTASMTSPLYISEASPARIRGALVSTNGLLITGGQFLSYLINLAFTKAPGTWRWMLGVAAIPAVVQFFLMLFLPESPRWXEPGGAXLMTTATVRRGLVAGVGLQVFQQLVGINTVMYYSPTIVQLAGFASNQTALALSLVTAGLNAAGSLVSIYFIDRTGRRKLLVISLAGVILSLALLSAVFHEATSHSPPVGAAETAHFHGVTCPDYSSRSSSSFWDCTRCLKAAAASAGCGFCAAGGGDKLPGACLAADATARDACRGEGREWYTRGCPSRYGWLAMAGLALYIAAFSPGMGTVPWIVNSEVYPLRHRGVCGGAAATANWVSNLAVAQSFLSLTDAIGAAWTFLIFGGLSVAALAFVLVCVPETKGLPIEEVEKMLEGRELRLRFWAKRRHHHGGDGDGGGEKTGGV

SEQ ID NO: 23783 - protein, 545 aa, Oryza sativa
MEGGATLADKAEFKECLRLTWSQPYILQLVFSAGIGGLLFGYDTGVISGALLYIRDDFTAVEKSTVLRETIVSMAVAGAIVGAGFGGWMNDKFGRKPSILIADSLFLAGALIMALAPTPFVIIIGRIFVGLGVGMASMTAPLYISEASPARIRGALVSTNGLLITGGQFMAYLINLAFTKDRKEEAEAILRKIYPAAEVEEEIDSMRRSIEHEKQLEGSIGEQSLVGKLTKALSSKVVRRGLMAGVIAQVAQQFVGINTVMYYSPTIVQLAGFASNNTAMALSLITSGLNAIGSIVSMFFVDRAGRRRLMIISLVGIVLWLAVLGGTFLGAAHHAPPVSDLETRVFANQTCPEYSPSARWNCMNCLKAQSTCGFCAHGGNKLLPGACLAAGEASRRTCHAGNREFYTEGCPNNFGWLALVALGAYIVSYSPGMGTVPWIVNSEIYPLRFRGVCGGIAAVANWVSNLIVTQTFLSLTKALGTSATFFLFCAVSFFALVVVFFTVPETKGLQFEEVEKMLGEKDYKPWKRYRPDVSSKGRDIGLSVP

SEQ ID NO: 23784 - protein, 746 aa, Sorghum bicolor
MSMIHCKLNVQAEDLMGGATGAQGDVQWCNGGKLEEVAVLGCAHRIMAAEVSTVHQEVCKMYFWFAGAAIASRLIDCEAYLRTEFSGFIIVCKRAIVLDEMKSTVFSAVVVSIGYAMLGWDFAALLEANHHMKKEFELLNGPSIEGITLAASTFGAIVITIFSGALLDWLGRRAILVYSSLVLFSGGVLMLWSPNIYIVLLARLIVGSGSGLVFTCVPIYISETSPPNMRGLLGTMPQFMFFIGTIFSYCLIFWLTLMSSPNWRIMIGAIFAPSIVYFALLVYYLPESPRWLASDGKISEARVSLQRLRGKKHDVSGEIAVIVDGVDIISDSAVGTARAQSFSGTSASRTWPRSTFYWQLSDPLVDLLGSIHENMSEGGSRRNSFFPVFNSFSFPEHEHMNEHRDGNSDQQTREAYSAGEVNNGDGLRASLLSQAASVEVNDANTSFTSEGSSSYLRRHGTSVLAQEFMASIHDHDIEEEEEIHGFVLPHQSAPRDMESRGRHQVVRLSETADMKFKWRVLLQPGIRHALCYGMLIQALQQSTGISGLLRCAPEILEQVGVSLFSDIGLSPHSTSILISTLQALLILPCITAAMLLMDVCGRRVLVLATTPILILSLSVMSMSILFNMGPFDRAIVFHFALTVCFCSYVIGLGPIPNILCSEIFPTKARATCASFCSLSFWFGGLLSAYCLPVMMSTIGLGGACGIYALVCCAPLFLFYYRIPETKMLNLELIAELFKLSRQEYVQ

SEQ ID NO: 23785 - protein, 213 aa, Triticum aestivum
  unsure (1)..(213): unsure at all Xaa locations
XTREMQELKESVEAEARERGSSERVSLTALVKTPTVRRALVAGVGLQVFQQLVGINTVMYYSPSIVQLAGFASNQTALALSLVTSGLNALGSIVSIYFIDRTGRRKLLVISLVGVIASLALLSAVFHETTTHSPAVGSAETRHFDGSLTCPDYRTSSSGWDCTRCLKASSTECGFCASGAGSKLLPGACLLSNATVRDACHGEGRLWYTRGCX

SEQ ID NO: 23786 - protein, 150 aa, Triticum aestivum
  unsure (1)..(150): unsure at all Xaa locations
MEGGAHEFDGSAFRECFSLSWRNPYVLRLAFSAGIGGLLFGYDTGVISGALLYIRDDFRSVDKNTWLQVIKXEMIVSMAVAGAIIGAAVGGWANDRFGRRTSILVADLLFFAGAVVMASATGPVQLVVGRVLVGLGVGMASMTAXLYISX

SEQ ID NO: 23787 - protein, 181 aa, Triticum aestivum
  unsure (1)..(181): unsure at all Xaa locations
QKYTRGCPSRYGWLAMVGLALYIAFFSPGMGTVPWIVNSEIYPLRHRGVCGGVAATANWVSNLVVAQSFLTLTEAIGPAWTFLIFGCLSVAALAFVLVCVPETKGLPIEEVEKMLEKRDLRLKFWAPRGRASKNDGLXVSSLPSSFSARTRQSVAIQVIGISICRLSILLYMLQITFVGFQ

SEQ ID NO: 23788 - protein, 408 aa, Zea mays
  unsure (1)..(408): unsure at all Xaa locations
MEGGAHEFDGSTFKECFSLSWRNPYVLRLAFSAGIGGLLFGYDTGVISGALLYIRDDFVSVDRNTWLQEMIVSMAVAGAIIGAAIGGWTTDRFGRRASILVADSLFFAGAAVMASATRPAQLVVGRVFVGLGVGMASMTSPLYISEASPARIRGALVSTNGFLITGGQFLAYLINLAFTKAPGTWRWMLGVAALPAVVQFGLMLALPESPRWLYRQGRAEEAEAILRRIYSAEEVEREIEELKESVAAERGSSEKLSLVALVRTATVRRGLVAGVGLQVFQQLVGINTVMYYSPTIVQLAGFASNQTALALSLVTSGLNALGSVVSIYFIDRTGRRKLLVISLVGVILSLGVLTAVFHETASHSPAVSATETARFDASLTCPSYRPSSPASAWDCTRCLKAAADKXAX

SEQ ID NO: 23789 - protein, 421 aa, Acinetobacter calcoaceticus
MPKEANMASQDYATQRSSLDAQALINDAPLSRYQWLIAIVCFLIVFVDGIDTAAMGFIAPALAQDWGVDRSQLGPVMSAALGGMIIGALVSGPTADRFGRKIVLSMSMLVFGGFTLACAYSTNLDSLVIFRFLTGIGLGAAMPNATTLFSEYCPARIRSLLVTCMFCGYNLGMAIGGFISSWLIPAFGWHSLFLLGGWAPLILMLLVIFFLPESYRFLIVKGKNTKKVRQILSRIAPQKVQGVTEFHVPEEKVEAGTKKGVFGMLFSAKYVKGTVLLWVTYFMGLVMIYLLTSWLPTLMRETGASLERAAFLGGLFQFGGVLSALFIGWAMDRFNPNRIIAGFYLAAGIFAVIVGQSLSNPTLLALFHFMCRYCRQWCSIFNASIECAFLSNAMSCNRCGMDVWNWPFWSPYLVHGLVQFY

SEQ ID NO: 23790 - protein, 457 aa, Acinetobacter calcoaceticus
MPKEANMASQDYATQRSSLDAQALINDAPLSRYQWLIAIVCFLIVFVDGIDTAAMGFIAPALAQDWGVDRSQLGPVMSAALGGMIIGALVSGPTADRFGRKIVLSMSMLVFGGFTLACAYSTNLDSLVIFRFLTGIGLGAAMPNATTLFSEYCPARIRSLLVTCMFCGYNLGMAIGGFISSWLIPAFGWHSLFLLGGWAPLILMLLVIFFLPESYRFLIVKGKNTKKVRQILSRIAPQKVQGVTEFHVPEEKVEAGTKKGVFGMLFSAKYVKGTVLLWVTYFMGLVMIYLLTSWLPTLMRETGASLERAAFLGGLFQFGGVLSALFIGWAMDRFNPNRIIAGFYLAAGIFAVIVGQSLSNPTLLALFILCAGIAVNGAQSSMPVLSARFYPTQCRATGVAWMSGIGRFGAVFGAWIGAVLLGNNWSFTMILSMLIIPARAAAIAIFVKSLVAHTDAT

SEQ ID NO: 23791 - protein, 312 aa, Schizosaccharomyces pombe
MSISSKDFQNVTSAGFADDTFAADTFAADKKSPFESSVFENKTQVLPVDSVSRLSNGARSRSNSNISLSEPHALNDTVEDQPVSKWVWVLAFAAGIGGLLFGYDTGVISGALVVIGTSLGGHELTNGGKEFITSATSLGALLGGIIAGALADFFGRKPVIAIASIIIIVGSIVQVTAHHLWHMIVGRFVIGWGVGIASLIIPLYLSEIAPSKIRGRLVIIYVLLITAGQVIAYGIDTAFEHVHNGWRWMVGLAMVPAAFQLFILIWLPESPRLLVKKERSQEAYNTLARIYPTAHPYEIKTKLYLIQEGVRD

SEQ ID NO: 23792 - protein, 612 aa, Saccharomyces cerevisiae
MAEMKNSTAASSRWTKSRLSHFFPSYTNSSGMGAASTDQSSTQGEELHHRKHCEEDNDGQKPKKSPVSTSTMQIKSRQDEDEDDGRIVIKPVNDEDDTSVIITFNQSISPFIITLTFVASISGFMFGYDTGYISSALISINRDLDNKVLTYGEKELITAATSLGALITSVGAGTAADVFGRRPCLMFSNLMFLIGAILQITAHKFWQMAAGRLIMGFGVGIGSLISPLFISEIAPKMIRGRLTVINSLWLTGGQLIAYGCGAGLNHVKNGWRILVGLSLIPTVLQFSFFCFLPDTPRYYVMKGDLKRAKMVLKRSYVNTEDEIIDQKVEELSSLNQSIPGKNPITKFWNMVKELHTVPSNFRALIIGCGLQAIQQFTGWNSLMYFSGTIFETVGFKNSSAVSIIVSGTNFVFTLIAFFCIDKIGRRYILLIGLPGMTVALVICAIAFHFLGIKFNGADAVVASDGFSSWGIVIIVFIIVYAAFYALGIGTVPWQQSELFPQNVRGVGTSYATATNWAGSLVIASTFLTMLQNITPTGTFSFFAGVACLSTIFCYFCYPELSGLELEEVQTILKDGFNIKASKALAKKRKQQVAEGAAHHKLKFEPTQEIVES

SEQ ID NO: 23793 - protein, 584 aa, Saccharomyces cerevisiae
MGIHIPYLTSKTSQSNVGDAVGNADSVEFNSEHDSPSKRGKIHIESHEIQRAPASDDEDRIQIKPVNDEDDTSVMITFNQSLSPFIITLTFVASISGFMFGYDTGYISSALISIGTDLDHKVLTYGEKEIVTAATSLGALITSIFAGTAADIFGRKRCLMGSNLMFVIGAILQVSAHTFWQMAVGRLIMGFGVGIGSLIAPLFISEIAPKMIRGRLTVINSLWLTGGQLVAYGCGAGLNYVNNGWRILVGLSLIPTAVQFTCLCFLPDTPRYYVMKGDLARATEVLKRSYTDTSEEIIERKVEELVTLNQSIPGKNVPEKVWNTIKELHTVPSNLRALIIGCGLQAIQQFTGWNSLMYFSGTIFETVGFKNSSAVSIIVSGTNFIFTLVAFFSIDKIGRRTILLIGLPGMTMALVVCSIAFHFLGIKFDGAVAVVVSSGFSSWGIVIIVFIIVFAAFYALGIGTVPWQQSELFPQNVRGIGTSYATATNWAGSLVIASTFLTMLQNITPAGTFAFFAGLSCLSTIFCYFCYPELSGLELEEVQTILKDGFNIKASKALAKKRKQQVARVHELKYEPTQEIIEDI

SEQ ID NO: 23794 - protein, 584 aa, Saccharomyces cerevisiae
MGIHIPYLTSKTSQSNVGDAVGNADSVEFNSEHDSPSKRGKITLESHEIQRAPASDDEDRIQIKPVNDEDDTSVMITFNQSLSPFIITLTFVASISGFMFGYDTGYISSALISIGTDLDHKVLTYGEKEIVTAATSLGALITSIFAGTAADIFGRKRCLMGSNLMFVIGAILQVSAHTFWQMAVGRLIMGFGVGIGSLIAPLFISEIAPKMIRGRLTVINSLWLTGGQLVAYGCGAGLNYVNNGWRILVGLSLIPTAVQFTCLCFLPDTPRYYVMKGDLARATEVLKRSYTDTSEEIIERKVEELVTLNQSIPGKNVPEKVWNTIKELHTVPSNLRALIIGCGLQAIQQFTGWNSLMYFSGTIFETVGFKNSSAVSIIVSGTNFIFTLVAFFSIDKIGRRTILLIGLPGMTMALVVCSIAFHFLGIKFDGAVAVVVSSGFSSWGIVIIVFIIVFAAFYALGIGTVPWQQSELFPQNVRGIGTSYATATNWAGSLVIASTFLTMLQNITPAGTFAFFAGLSCLSTIFCYFCYPELSGLELEEVQTILKDGFNIKASKALAKKRKQQVARVHELKYEPTQEIIEDI

SEQ ID NO: 23795 - protein, 450 aa, Desulfitobacterium hafniense
MTMTGSDQSAPTYFDDMKLTSSHKRMLWLAAICYMFDQMDVGTFAYAAPVLVKTWGLTMEQIAQVNSYGFVGMFLGAIFGGWIADKIGRKKTIILCVAIFSLGSLGNALAFNFHTLAITRFFTGLGVIGMLVVAMVYIAEMMPSEHRGRYQALTMACGTIAIPVGAAFARWVVPLSTESWRYIFVLGGTSILLLPFCFIVFKESPRWLVSKGRITEAEKVIREITGREVDLSSEVPEKIKKSSSLSTLKLILSKEYLKRTIILVIITDGVVLGAQMLGGFYPAILQEYAGFQLTLVLSIMALSWWGIPFGDLSASLVSDKGGRKGPLALFSIINGMTFVVCGFFPTPAVIIAAVFLSRVFGGGSVSILYTYLAESYPTHIRSTAVGLIMGQVRILSAVIVLIVPPILATYGWLGVHLVNAGIIIVTAIVALIFGQKTSKRTLEEINKAPG

SEQ ID NO: 23796 - protein, 450 aa, Desulfitobacterium hafniense
MKYPISQRFEVEDRKMRKINVNKVIDEAKFNRYFLIIFVLLLLALIFDGYDMGIYGVTLPSVMKELNLNATQTGLLASAGMFGMMFGALLFGMLSDVIGRKKTIIIGIFVYSVFNGIVAFIHSASIFAVVRFIAGMGMGALTPVVISLLSEYTPRSRRTLLLTMVMVGIPLGQLVASLAGVAFLESIGWRVLYLATLIALIMIAFVVWNVPESMKFYVPRGETKTIKKVLAKANPDFEQTEEDVYELSIVNQQKASLGSLFKSGYAKNTIYIWIAFFCNLYLFFGISTWLPKLMTMLGYPLKSSVMFLAIFLLGGVLTTPFVGMLGDKYGYKKVMPVLYAMSAVLVSLLSFQMSTFIFYTLLFLAGCAVTLVQSMTLAAAPDFYPIAFRGTAMGWGSAVSRLGSAVAPTVVGVLLTANLPVRGVFLTFIIPAVIACIAILLTKKDPDLVG

SEQ ID NO: 23797 - protein, 451 aa, Desulfitobacterium hafniense
MSISTQFSVPQRMERLPLTSYQKKIFYIIATAWFFDSMDLGMLTFVLGSIKTDLGLTTVQAGLLSSFSFLGMFFGAASAGMAADKFGRKIVFQTSMILWGAASIACAFTQNVEQLALARFFLGLGMGMEFPIGQSLISEFIPAKNRGRYIALLEGFWPIGFIAAGILSYFLLPIGGWRLVFLCEGIPAIFVLIIRRMVPESPRWLADTNQDEKADVVMTAFEKNVEKAYGKELPPPIKDDNLVIGKHEKKFSFLQLWAPGYKKRTIMVWLLWFFALLGYYGLTTWLSAFLQEAGYSVTKSVYYTIMISLAGIPGFFSAAYFIEKNGRKPTLIVVLIGCAVFAYLYGTASSLQTLIGFGLGMQFFLFAMWSSLYAYTPELYPTRARATGTGFASSVGRFGSLLGPYIVAVVLPTLGNSGVFALGAACFIAAALSVAILGEETKGRVLEEISA

SEQ ID NO: 23798 - protein, 537 aa, Neurospora crassa
MTDNPEEPLIANTQSTERDQDDGSHDVEHAHDSRGGKQHISPPGLFIWLLTFSAGISGLLFGYDTGVISATLVSIGTSLSHRPLTSLDKSVITSCTSLFALLALPFASALADDRGRKRVVLFADTLFIIGALCQAASRTVEVMVIGRSVVGIAIGAASFVTPLYIAELAPATHRGRLVTMNIVFITLGQVVAYVVGWIFGTYGSPETTGWRWMVGLGAVPAVCQVVILLWMPESPRWLVKDGRSQEARAVIAKIAAGDDAQDPSTRREVDAVLKSIEIEVREEATAMRLGGAGAGYANGNAVNAWMEAMRELIRVRRNRRALAIACLLQGLQQLCGFNSLMYFSATIFTMVGFSEPTLTSLVVAVTNFAFTLVALVLIDRVGRRRILLWSLPFMIAGLVLAGYGFSFIELPNSETSSPSTTGGQGGAVIILASIMIYVAGYAIGLGNVPWMQSELFSLSVRSVGSGVATATNWSANFVIGLTFLPLMEALSPSWTFVLYAVICAVGYGLIWTVYPETAGLSLEDAATLLEADDWGVR

SEQ ID NO: 23799 - protein, 487 aa, Neurospora crassa
MTDNPEEPLIANTQSTERDQDDGSHDVEHAHDSRGGKQHISPPGLFIWLLTFSAGISGLLFGYDTGVISATLVSIGTSLSHRPLTSLDKSVITSCTSLFALLALPFASALADDRGRKRVVLFADTLFIIGALCQAASRTVEVMVIGRSVVGIAIGAASFVTPLYIAELAPATHRGRLVTMNIVFITLGQVVAYVVGWIFGTYGSPETTGWRWMVGLGAVPAVCQVVILLWMPESPRWLVKDGRSQEARAVIAKIAAGDDAQDPSTRREVDAVLKSIEIEGLQQLCGFNSLMYFSATIFTMVGFSEPTLTSLVVAVTNFAFTLVALVLIDRVGRRRILLWSLPFMIAGLVLAGYGFSFIELPNSETSSPSTTGGQGGAVIILASIMIYVAGYAIGLGNVPWMQSELFSLSVRSVGSGVATATNWSANFVIGLTFLPLMEALSPSWTFVLYAVICAVGYGLIWTVYPETAGLSLEDAATLLEADDWGVR

SEQ ID NO: 23800 - protein, 600 aa, Drosophila melanogaster
MSNLSEDSYDYVFGGRRKTPPTTTSTQLKLTSPPVRLRPEDAYRGANINNGRFYRHSFSYAPKRQRHSSRDDRDRESRLRCHGEDEATLRQLLLDLQKQVSVMSMNLSAKLDELQRGDRHLETTVALCEIRTQLQELTKSVESCQSEVSEVKRDMVAIKHELDTVQQVKEEIEELREYVDRLEEHTHRRKLRLLEQGLTFFLTYSIFSAVLGMLQFGYNTGVINAPEKNIENFMKDVYKDRYGEDISEEFIQQLYSVAVSIFAIGGMLGGFSGGWMANRFGRKGGLLLNNVLGIAGACLMGFTKVSHSYEMLFLGRFIIGVNCGLNTSLVPMYISEIAPLNLRGGLGTVNQLAVTVGLLLSQVLGIEQILGTNEGWPILLGLAICPAILQLILLPVCPESPRYLLITKQWEEEARKALRRLRASGSVEEDIEEMRAEERAQQSESHISTMELICSPTLRPPLIIGIVMQLSQQFSGINAVFYYSTSLFMSSGLTEESAKFATIGIGAIMVVMTLVSIPLMDRTGRRTLHLYGLGGMFIFSIFITISFLIKASIVVSRILESCSCSCRVMPANVNAKMPASLGLHLFVPRPFSDLHMTLKS

SEQ ID NO: 23801 - protein, 647 aa, Drosophila melanogaster
MATIGDLSMISPPTSSISNDQDPFGQLPPLPPPLRSTQVLQPLSVFPVSNLSEDSYDYVFGGRRKTPPTTTSTQLKLTSPPVRLRPEDAYRGANINNGRFYRHSFSYAPKRQRHSSRDDRDRESRLRCHGEDEATLRQLLLDLQKQVSVMSMNLSAKLDELQRGDRHLETTVALCEIRTQLQELTKSVESCQSEVSEVKRDMVAIKHELDTVQQVKEEIEELREYVDRLEEHTHRRKLRLLEQGLTFFLTYSIFSAVLGMLQFGYNTGVINAPEKNIENFMKDVYKDRYGEDISEEFIQQLYSVAVSIFAIGGMLGGFSGGWMANRFGRKGGLLLNNVLGIAGACLMGFTKVSHSYEMLFLGRFIIGVNCGLNTSLVPMYISEIAPLNLRGGLGTVNQLAVTVGLLLSQVLGIEQILGTNEGWPILLGLAICPAILQLILLPVCPESPRYLLITKQWEEEARKALRRLRASGSVEEDIEEMRAEERAQQSESHISTMELICSPTLRPPLIIGIVMQLSQQFSGINAVFYYSTSLFMSSGLTEESAKFATIGIGAIMVVMTLVSIPLMDRTGRRTLHLYGLGGMFIFSIFITISFLIKASIVVSRILESCSCSCRVMPANVNAKMPASLGLHLFVPRPFSDLHMTLKS

SEQ ID NO: 23802 - protein, 617 aa, Homo sapiens
MVPVENTEGPSLLNQKGTAVETEGSGSRHPPWARGCGMFTFLSSVTAAVSGLLVGYELGIISGALLQIKTLLALSCHEQEMVVSSLVIGALLASLTGGVLIDRYGRRTAIILSSCLLGLGSLVLILSLSYTVLIVGRIAIGVSISLSSIATCVYIAEIAPQHRRGLLVSLNELMIVIGILSAYISNYAFANVFHGWKYMFGLVIPLGVLQAIAMYFLPPSPRFLVMKGQEGAASKVLGRLRALSDTTEELTVIKSSLKDEYQYSFWDLFRSKDNMRTRIMIGLTLVFFVQITGQPNILFYASTVLKSVGFQSNEAASLASTGVGVVKVISTIPATLLVDHVGSKTFLCIGSSVMAASLVTMGIVNLNIHMNFTHICRSHNSINQSLDESVIYGPGNLSTNNNTLRDHFKGISSHSRSSLMPLRNDVDKRGETTSASLLNAGLSHTEYQIVTDPGDVPAFLKWLSLASLLVYVAAFSIGLGPMPWLVLSEIFPGGIRGRAMALTSSMNWGINLLISLTFLTVTDLIGLPWVCFIYTIMSLASLLFVVMFIPETKGCSLEQISMELAKVNYVKNNICFMSHHQEELVPKQPQKRKPQEQLLECNKLCGRGQSRQLSPET

SEQ ID NO: 23803 - protein, 338 aa, Homo sapiens
MGERRRKQPEPDAASAAGECSLLAAAESSTSLQSAGAGGGGVGDLERAARRQFQQDETPAFVYVVAVFSALGGFLFGYDTGVVSGAMLLLKRQLSLDALWQELLVSSTVGAAAVSALAGGALNGVFGRRAAILLASALFTAGSAVLAAANNKETLLAGRLVVGLGIGIASMTVPVYIAEVSPPNLRGRLVTINTLFITGGQFFASVVDGAFSYLQKDGWRYMLGLAAVPAVIQFFGFLFLPESPRWLIQKGQTQKARRILSQMRGNQTIDEEYDSIKNNIEEEEKEVGSAGPVICRMLSYPPTRRALIVGCGLQMFQQLSGINTIMYVFLSGFLLKRL

SEQ ID NO: 23804 - protein, 541 aa, Homo sapiens
MGHSPPVLPLCASVSLLGGLTFGYELAVISGALLPLQLDFGLSCLEQEFLVGSLLLGALLASLVGGFLIDCYGRKQAILGSNLVLLAGSLTLGLAGSLAWLVLGRAVVGFAISLSSMACCIYVSELVGPRQRGVLVSLYEAGITVGILLSYALNYALAGTPWGWRHMFGWATAPAVLQSLSLLFLPAGTDETATHKDLIPLQGGEAPKLGPGRPRYSFLDLFRARDNMRGRTTVGLGLVLFQQLTGQPNVLCYASTIFSSVGFHGGSSAVLASVGLGAVKVAATLTAMGLVDRAGRRALLLAGCALMALSVSGIGLVSFAVPMDSGPSCLAVPNATGQTGLPGDSGLLQDSSLPPIPRTNEDQREPILSTAKKTKPHPRSGDPSAPPRLALSSALPGPPLPARGHALLRWTALLCLMVFVSAFSFGFGPVTWLVLSEIYPVEIRGRAFAFCNSFNWAANLFISLSFLDLIGTIGLSWTFLLYGLTAVLGLGFIYLFVPETKGQSLAEIDQQFQKRRFTLSFGHRQNSTGIPYSRIEISAAS

SEQ ID NO: 23805 - protein, 504 aa, Streptomyces coelicolor A3(2)
MTAETSSSGSVPASTGTVTTAVPARLDRLPWSRWHWMIVIGLGTVWILDGLEVTIVGNVAGRIAEDGSGLDISSAQITGLAAALYVAGACSGALFFGWLTDRHGRKKLFMLTLVVYLAATALTAVSFESWWFFLFRFLTGFGIGGEYAAINSAIDELIPSHYRGRVDLIINGSYWLGAIGGALLSIVMLDTDIFAKDVGWRLSFALGVVLGLVVLLVRRHVPESPRWQFIHGQGEKADTLVSSVEREIEREKGAKLPPPAGEITIHQRKSIGFGLIAKTVFRRYPRRAVLGLSLFIGQAFLYNAITFGFGTILITFFDVPTGSTGYYFAVIAAGNFCGPLLLGHLFDTVGRRIMISSTYLLSGVLLFGTAWLFDRGSLTATTMTACWCVVLFFASAGASSAYLTVSEIFPMETRAMAIAFFYALGTAAGGISGPLLFADLTESGVVGDTVLAFQIGAGLMCAAGLVAAFLAVKAERRSLEDIAEPLSTAVPETPGTAGPGAKTA

SEQ ID NO: 23806 - protein, 473 aa, Bacillus megaterium
MKQNRNSLYIFSITLVAAIGGLLFGYDTAVISGAEESLKVYLIDSLGLGSLAHGVTVSSALIGCIIGGLVSGYFATKLGRKQSLILAAILFIVSALGASYPEFLFFTKGEPTLSLLLAFNFYRIIGGIGVGLASAICPIYIGEIAPADIRGRLVSFNQFMIIFGMLVVYFVNWGIANGETLEWINDVGWRYMFASGAIPALLFAALLFLVPETPRYLAIQNQDQKALAILTKINGSSEAKAILEDIKQTISTNVSSEKLLAYGKLVIVVGILLSVFQQFVGINVALYYAPRIFESMGAAKGSSMLQTIIMGLVNVIFTVIAILTVDRLGRKPLLITGSIGMAIGMFGVASMAFSNIIGIGTLVFIIIYTASFMMSWGPICWVLISEIFPNKIRGRAVAIAVAAQWAANYFISSTYPVMMEYSGGLTYGFYGLMSVLSALFVWKFVPETKGRTLEQMENMWRKKQGASKSKKAI

SEQ ID NO: 23807 - protein, 455 aa, Clostridium acetobutylicum
MNKKISPALIYFFGAFGGFMFGYDIGIINGALPGINATWHVSSWLEGFITSGLFVGAMIGASLMASLADRFGRRRMIMWSAIVFALGALGSAVSTSTNLLIGARVILGVAVGGASALVPMYMGEISPAETRGKLSGLNQLMITVGMLFSYGVNFAFAGAFEGWRWMLGGAMVPAMVLLIGTFILPESPRFLARIGKTELAKQVLQTLRSKEEAETEYQEIINSKHTETGSFGDLFAKQALPAVIAGCGLTLLQQIQGANTIFYYSSQILSNVFGSANGGTISTVGIGVVLVLATIVTLLVVDKFKRRTLFMTGSIGMGASLLLVGLIYPYSEAKHAWATWLVFFFICLYVVFYAYSWAATTWIVVGELFPSNVRGLATGIASAVNWFGNILVALFFPVLLETVGLSVIFFGFAAICIIGFLFAKYVLYETKGKSLEEIETYLYNRSIGKVRGLNE

SEQ ID NO: 23808 - protein, 418 aa, Escherichia coli O157:H7 EDL933
MYQSRFTCTRNEVHLMSTRTPSSSSSRLMLTIGLCFLVALMEGLDLQAAGIAAGGIAQAFALDKMQMGWIFSAGILGLLPGALVGGMLADRYGRKRILIGSVALFGLFSLATAIAWDFPSLVFARLMTGVGLGAALPNLIALTSEAAGPRFRGTAVSLMYCGVPIGAALAATLGFAGANLAWQTVFWVGGVVPLILVPLLMRWLPESAVFAGEKQAAPPLRALFAPETATATLLLWLCYFFTLLVVYMLINWLPLLLVEQGFQPSQAAGVMFALQMGAASGTLMLGALMDKLRPVTMSLLIYSGMLASLLALGTVSSFNGMLLAGFVAGLFATGGQSVLYALAPLFYSSQIRATGVGTAVAVGRLGAMSGPLLAGKMLALGTGTVGVMAASAPGILVAGLAVFILMSRRLRMQPCADA

SEQ ID NO: 23809 - protein, 413 aa, Pseudomonas putida KT2440
MHHSCASSGKAVLTIGLCFLVALLEGLDLQATGIAAPHMAKAFNLTPAMLGWVFSAGLLGLLPGALIGGWLADRFGRKAILIVAVLLFGGFSLGTAHAQTYDSLLIARLMTGLGLGAALPILIALASEAAPERLRSTAVSLTYCGVPLGGAVASLIGMAGVGDGWRTVFYVGGIAPIVIAFVLMIWLKESQAFRAQGVAKAGSEGVLAQLFGPQQASRTLLLWVACFFTLTVLYMLLNWLPSLLIGQGFSRPQAGAVQILFNLGGAAGSFLTGRMMDRGFAGRAVLIAYAGMLASLAGLGLSSSFGLMLLAGFTAGYCAIGGQLVLYALAPTLYSTQVRATGLGASVAVGRLGSMAGPLAAGQILAAGAGAGGLLMAAAPGLVLAALAARALLKHRTRTQRPEPGEAAAQDPA

SEQ ID NO: 23810 - protein, 433 aa, Oceanobacillus iheyensis HTE831
MSKQRFAAKNVTGWKATIAIAMANYIEAGSIIAAASSLTLWQAYLGFDSLGVGLLSALSANALGAAIGALIGGPLTDKYGRKIIFSYDLLVYMIGVALIAASVNFPMLLIGTIITGIAVGAGVPVSWTYIAEESPKKKRAAHVGAAQLAWSIGPMITFALAVLVAPLELLGSRLIFIHLFIVAGLALYIRRGLPESKIWEEQKARDDADKAKGIVKKGTLKELFTLKPNREALFLLLGIYLFWNLTAGAMGYFMPYIYENVGGLSNMEANLLQSFLWMFTVLTTFFIFMKLGDKISRKTLFTIGALMGVAAWIILTFMPMTWPTLIAFVILWGSAAGIGAQAFYALWTSELFPTRYRATAQGFMYFIVRTGIALWSVVLPVIMDTLGFVVAGIVMIIFLVIHLVIGVVLAPDTRGKTLTEIEEERYGKERIAN

SEQ ID NO: 23811 - protein, 501 aa, Streptomyces avermitilis MA-4680
MSASAPQAHGPAATGTVTTDVPARLDRLPWSRWHWMIVIGLGTVWILDGLEVTTVGNIAGRLSEDGSGLSITSAQVTGVAAALYVAGACAGALFFGWLTDRFGRKKLFMVTLVVYLSATALTALSFNSWWFFTFRFLTGFGIGGEYAAINSAIDELIPAKYRGRVDLIINGSYWLGAIGGALLSIVMLDTSIFPKDLGWRLTFALGVVLGLVILLVRRHVPESPRWQFIHGRGEDAEALVSSVEREIEQEKGEPLPRAESEITIEQRKSIGFGLIAKTVFGRYPKRAVLGLALFIGQAFLYNAITFGFGAILTTFYDVPTGGTGYYFAVIAAGNFIGPLLLGKLFDTVGRRIMIASTYLLSGLLLFGTAWLFDRGSLSAMTLTACWCAVLFFASAGASSAYLTVSEVFPMETRAMAIAFFYALGTAAGGISGPLVFADLTESGVVGDTVLAFQIGAGLMCAAGLVAAFLAVNAERRSLEDIAEPLSVAQTTAPAPASASGT

SEQ ID NO: 23812 - protein, 555 aa, Mesembryanthemum crystallinum
MQASSCLVKGNLGFEVQNRRRGVLAVAGLGGFKNSSPILSSNLRFVNGVINKKSSSCKLTTSGSVLMGAGLARMGLDHVFQSTAKYRSVKAQAASGDYEDPAPVKFQGKSSASVLPYVGVACLGAILFGYHLGVVNGALEYLSPDLGIAGNTVLQGWVVSILLAGATVGSFTGGSLADKFGRTRTFQLDAIPLAIGAYLCATAQSVQTMMIGRLLCGIGIGISSALVPLYISEISPTEIRGALGSVNQLFICIGILAALVAGLPLAGNPLWWRTMFGIAAIPSVLLALGMAMCPESPRWLFQQGKVAEAEKASAALYGKERVPEVMNDLKASVQGSSEPEAGWFDLFSSRYRKVVSVGAALFLFQQMAGINAVVYYSTSVFRSAGIESDVAASALVGAANVFGTAIASSLMDRQGRKSLLITSFSGMAASMLLLSLSFTWPVLAPYSGTLAVLGTVLYVLSFSLGAGPVPALLLPEIFASRIRAKAVALSLGMHWASNFVIGLYFLSVVTKFGISRVYLGFASVCMLAVLYIAGNVVETKGRSLEEIERALSPAV

SEQ ID NO: 23813 - protein, 546 aa, Arabidopsis thaliana
MQSSTYAVKGNAAFAFQRRTFSSDRSTTSTGIRFAGYKSLATTGPLYCSGSEAMGATLARADNGIQSVMSFSSVKARSVRAQASSDGDEEEAIPLRSEGKSSGTVLPFVGVACLGAILFGYHLGVVNGALEYLAKDLGIAENTVLQGWIVSSLLAGATVGSFTGGALADKFGRTRTFQLDAIPLAIGAFLCATAQSVQTMIVGRLLAGIGIGISSAIVPLYISEISPTEIRGALGSVNQLFICIGILAALIAGLPLAANPLWWRTMFGVAVIPSVLLAIGMAFSPESPRWLVQQGKVSEAEKAIKTLYGKERVVELVRDLSASGQGSSEPEAGWFDLFSSRYWKVVSVGAALFLFQQLAGINAVVYYSTSVFRSAGIQSDVAASALVGASNVFGTAVASSLMDKMGRKSLLLTSFGGMALSMLLLSLSFTWKALAAYSGTLAVVGTVLYVLSFSLGAGPVPALLLPEIFASRIRAKAVALSLGMHWISNFVIGLYFLSVVTKFGISSVYLGFAGVCVLAVLYIAGNVVETKGRSLEEIELALTSGA

SEQ ID NO: 23814 - protein, 515 aa, Arabidopsis thaliana
FAGYKSLATTGPLYCSGSEAMGATLARADNGIQSVMSFSSVKARSVRAQASSGDEEEAIPLRSEGKSSGTVLPFVGVACLGAILFGYHLGVVNGALEYLAKDLGIAENTVLQGWIVSSLLAGATVGSFTGGALADKFGRTRTFQLDAIPLAIGAFLCATAQSVQTMIVGRLLAGIGIGISSAIVPLYISEISPTEIRGALGSVNQLFICIGILAALIAGLPLAANPLWWRTMFGVAVIPSVLLAIGMAFSPESPRWLVQQGKVSEAEKAIKTLYGKERVVELVRDLSASGQGSSEPEAGWFDLFSSRYWKVVSVGAALFLFQQLAGINAVVYYSTSVFRSAGIQSDVAASALVGASNVAGTAVASSLMDKMGRKSLLLTSFGGMVHSMLLLSLSFTWKALAAYSGTLAVVGTVLYVLSFSLGAGPVPALLLPEIFASRIRAKAVALSLGMHWISNFVIGLYFLSVVTKFGISSVYLGFAGVCVLAVLYIAGNVVETKGRSLEEIELALFVSSFSL

SEQ ID NO: 23815 - protein, 560 aa, Arabidopsis thaliana
MQSSTYAVKGNAAFAFQRRTFSSDRSTTSTGIRFAGYKSLATTGPLYCSGSEAMGATLARADNGIQSVMSFSSVKARSVRAQASSDGDEEEAIPLRSEGKSSGTVLPFVGVACLGAILFGYHLGVVNGALEYLAKDLGIAENTVLQGKYMMIHFFTPPVNGWIVSSLLAGATVGSFTGGALADKFGRTRTFQLDAIPLAIGAFLCATAQSVQTMIVGRLLAGIGIGISSAIVPLYISEISPTEIRGALGSVNQLFICIGILAALIAGLPLAANPLWWRTMFGVAVIPSVLLAIGMAFSPESPRWLVQQGKVSEAEKAIKTLYGKERVVELVRDLSASGQGSSEPEAGWFDLFSSRYWKVVSVGAALFLFQQLAGINAVVYYSTSVFRSAGIQSDVAASALVGASNVFGTAVASSLMDKMGRKSLLLTSFGGMALSMLLLSLSFTWKALAAYSGTLAVVGTVLYVLSFSLGAGPVPALLLPEIFASRIRAKAVALSLGMHWISNFVIGLYFLSVVTKFGISSVYLGFAGVCVLAVLYIAGNVVETKGRSLEEIELALTSGA

SEQ ID NO: 23816 - protein, 547 aa, Glycine max
MQASTFGVEGATFGVQERRGLVGFGEFRNGSVLRPRRVCMTKNNTDLCGLRLGSVTMETELTSARIGFGGIFGPSVKPRSVRVMASDGNIEDVVPATPQGKSSGNVLPYVGVACLGAILFGYHLGVVNGALEYLAKDLGITENTVLQGWIVSTLLAGATVGSFTGGSLADQFGRTRTFQLASIPLAIGAFLGATAQSVQPMIIGRLLAGIGIGVTSAIVPLYISEISPTEIRGALGSVNQLFICIGILLALVAGLPLAGNPIWWRSMFGIAIVPSVLLALGMAISPESPRWLVQQGKISEAEKAIKTLYGQERVAAVMNDLTTASQGSSEPEAGWLDLFSSRYWKVVSVGAALFLFQQLAGINAVVYYSTSVCRSAGIASDVAASALVGASNVFGTCIASSLMDKQGRKSLLITSFSGMAASMLLLSLSFTWKVLAPYSGTLAVLGTVLYVLSFSLGAGPVPALLLPEIFASRIRAKAVSLSLGTHWISNFVIGLYFLSVVNKFGISTVYLGFSIVCLLAVVYIARNVVETKGRSLEEIERALSAST

SEQ ID NO: 23817 - protein, 380 aa, Glycine max
  unsure (1)..(380): unsure at all Xaa locations
MNIMSSSRSRSSWCGLWPGSFNMETELTIRGKSFGGIFGSSAKPRSLRVQPSDEDVEDLLPSNISGKPSGTVLPYVGVACLGAMLFGYHLGVVNGSLEYLAKDLGITQNTVIQGWIVSALLAGATVGSFTGGALADKFGRTRTFQLDAIPLAIGGFLCATAQSVQTMIIGRLLAGIGIGVTSAIVPLYISEISPTEIRGALGSVNQLFICIGILAALLAGLPLVGNPIWWRTMFGITVVPSVLLALGMTISPESPRWLFQQGKISEAEKAVKTLYGKERVALVMHDLTAASEGSSEPEAGWFDLFSSRYRKVVSVGATLFLLQQLAGINAVVYYSTSVFRSAGITSDVAASALVGASNVFGTIVASSLMDKKGRKSLLIX

SEQ ID NO: 23818 - protein, 380 aa, Glycine max
  unsure (1)..(380): unsure at all Xaa locations
MNIMSSSRSRGSWCGLWPGSFNMETELTIRGKSFGGIFGNFSSAKPRSLRVQXXSDEDVEDLLPSNISGKPSGTVLPYVGVACLGAMLFGYHLGVVNGSLEYLAKDLGITQNTVIQGWIVSALLAGATGGSFTGGALADKLGRTRTFQLDAIPLAIGGFLCATAQSVQRLEIGRLLAGIGIGVTSAIVPLYISEISPTEIRGALGSVNQLFICIGILAALLAGLPLVGNPIWWRTMFGITVVPSVLLALGMTISPESPRWLFQQGKISEAEKAVKTLYGKERVALVMHDLTAASEGSSEPEAGWFDLFSSRYRKVVSVGATLFLLQQLAGINAVVYYSTSVFRSAGITSDVAASALVGASNVFGTIVAWRLMKKSRSIAD

SEQ ID NO: 23819 - protein, 535 aa, Oryza sativa (japonica cultivar-group)
MAGTGASVKMIRCVVKCGGQQQHVVVAARGDRKSPAIAAPPPATVRMPGRVLCCGMRSRGADLAGVEMAAGPQPQGGVSGLFRGPRSSPRYSRVRATATVDPEDIPLEKVQAKSSGSVLPYVGVACLGAILFGYHLGVVNGALEYLAKDLGISENAVLQGWVVSTTLAGATAGSFTGGALADKFGRTRTFILDAIPLAVGAFLSATAHDVRTMIIGRLLAGIGIGISSALVPLYISEVFHPLKYVEHLVLLISFLSALEFLLLWWRTMFGISIVPSILLALGMAVSPESPRWLFQQGKLSQAETAIKKLYGREKVAEVMYDLKAASQGSSEPDAGCVGAAMFLFQQLAGINAVVYYSTSVFRSAGIASDVAASALVGAANVFGTMIASSLMDKQGRKSLLITSFSGMAASMLLLSLSFTWKALAPYSGPLAVAGTVLYVLSFALGAGPVPALLLPEIFASRIRAKAVALSLGMHWVSNFFIGLYFLSVVNKFGISTVYLGFASVCALAVVYIAGNVVETKGRSLEEIERALSSAS

SEQ ID NO: 23820 - protein, 535 aa, Oryza sativa; identical to SEQ ID NO: 23819

SEQ ID NO: 23821 - protein, 264 aa, Oryza sativa
VSPESPRWLFQQGKLSQAETAIKKLYGREKVAEVMYDLKAASQGSSEPDAGWLDLFSKRYWKVVSVGAAMFLFQQLAGINAVVYYSTSVFRSAGIASDVAASALVGAANVFGTMIASSLMDKQGRKSLLITSFSGMAASMLLLSLSFTWKALAPYSGPLAVAGTVLYVLSFALGAGPVPALLLPEIFASRIRAKAVALSLGMHWVSNFFIGLYFLSVVNKFGISTVYLGFASVCALAVVYIAGNVVETKGRSLEEIERALSSAS

SEQ ID NO: 23822 - protein, 611 aa, Triticum aestivum
  unsure (1)..(611): unsure at all Xaa locations
IGRGLFVPRELAINPTPLGSRRASARSRRCDDVVFHPSPRQPLHSRKVPLSPPVKMMRCAVRGGGAHVXXIGERRSPSSSPGSGRSVVRMSEGRGGLCCGGVRSRAADLAGLEMGRPSAGAAGLFRCPRYGRVRATASADPEDIPSDKLQAKSSGSVLPYVGVACLGAILFGYHLGVVNGALEYLSKDLGIAENAVLQGWVVSTTLAGATVGSFTGGALADKLGRTRTFILDAIPLAVGAFLSATAQDVRTMIIGRLLAGIGIGISSALVPLYISEISPTEIRGALGTINQLFICIGILAALVAGLPLAQNPAWWRTMFGISIVPSILLALGMAVSPESPRWLFQQGKISQAEAAIKKLYGKEKVTEVMYDLKASGQGSNEPDANWFDLFSKREWGVVSVGAALFLLQQLAGINAVXVYYSTSVFRSAGIASDVAASALVGAANVFGTMIASSLMDKQGRKSLLITSFSGMAASMLLLSLSFTWKALAPYSGTLAVVGTVLYVLSFALGAGPVPALLLPEIFASRIRAKAVALSMGMHWVSNFFIGLYFLSVVNKFGISTVYLGFASVCALAVLYIAGNVVETKGRSLEEIERELSPPNKADANAFLVSDQ

SEQ ID NO: 23823 - protein, 539 aa, Aspergillus oryzae
MTPEKAAMSEHIENDNPARHDDIDLPNSSEAHTAIAKEREMTLWQALRLYPKAVAWSLLFSCAIIMEGYDVVLIGSFLAFPAFNEKYGGLMSDGTYGLEARWQAGVNNAMACGQIIGLFLNGLVSERLGYRKTLMACLAATVGFVFILFFAPNIQTLVVGELFMGIPLGVYQTLVVTYASEVCPVALRAYLTTYVNLCWVLGQLLASGVLKGLAERTDQWAYRIPFALQWIWPIPIFIGVFLAPESPWWLVRQDRREDAVKALKRLTSANADFNAEETVAMIVYTDALERRAETGTSYLDCFKKSDLRRTEISCCAWAAQSLCGAGLMGYSTVFYQRAGLAVSQSFTMSLVQYALGVVGTFVSWTLMSYFGRRTLYVGGLFILAIVLFVIGFVSIAPSTPAISWATGSMLLVYTFIYDSSIGPVCFALVSEIPSSRLRTKTVVLARNVYNILNLVTGIIIPYMLNVDAWNWRGKSGFFWGALCVCCLTWSFFRLPEPKGRSYAELDLLFERGVKTREFATAKTGLEDLQGEGKDDMVKV

SEQ ID NO: 23824 - protein, 170 aa, Brassica rapa subsp. pekinensis
  unsure (1)..(170): unsure at all Xaa locations
GIQSDVAASALVGASNVXGTAVASSLMDKMGRKSLLLTSFGGMALSMLLLSLSFTWKALAAYSGTLAVVGTVLYVLSFSLGAGPVPALLLPEIFASRIRAKAVALSLGMHWISNFVIGLYFLSVVTKFGISSVYLGFAGVCVLAVMYIAGNVVETKGRSLEEIELALTSG

SEQ ID NO: 23825 - protein, 403 aa, Escherichia coli
MSTRTPSSSSSRLMLTIGLCFLVALMEGLDLQAAGIAAGGIAQAFALDKMQMGWIFSAGILGLLPGALVGGMLADRYGRKRILIGSVALFGLFSLATAIAWDFPSLVFARLMTGVGLGAALPNLIALTSEAAGPRFRGTAVSLMYCGVPIGAALAATLGFAGANLAWQTVFWVGGVVPLILVPLLMRWLPESAVFAGEKQSAPPLRALFAPETATATLLLWLCYFFTLLVVYMLINWLPLLLVEQGFQPSQAAGVMFALQMGAASGTLMLGALMDKLRPVTMSLLIYSGMLASLLALGTVSSFNGMLLAGFVAGLFATGGQSVLYALAPLFYSSQIRATGVGTAVAVGRLGAMSGPLLAGKMLALGTGTVGVMAASAPGILVAGLAVFILMSRRSRIQPCADA

SEQ ID NO: 23826 - protein, 435 aa, Escherichia coli
MFAIVAFGLLVCWSNAVGGLILAQLKALGWTDNSTTATFSAITTAGMFLGALVGGIIGDKTGRRNAFILYEAIHIASMVVGAFSPNMDFLIACRFVMGVGLGALLVTLFAGFTEYMPGRNRGTWSSRVSFIGNWSYPLCSLIAMGLTPLISAEWNWRVQLLIPAILSLIATALAWRYFPESPRWLESRGRYQEAEKVMRSIEEGVIRQTGKPLPPVVIADDGKAPQAVPYSALLTGVLLKRVILGSCVLIAMNVVQYTLINWLPTIFMTQGINLKDSIVLNTMSMFGAPFGIFIAMLVMDKIPRKTMGVGLLILIAVLGYIYSLQTSMLLITLIGFFLITFVYMYVCYASAVYVPEIWPTEAKLRGSGLANAVGRISGIAAPYAVAVLLSSYGVTGVFILLGAVSIIVAIAIATIGIETKGVSVESLSIDAVANK

SEQ ID NO: 23827 - protein, 222 aa, Oncorhynchus mykiss
LQNSPLLQLSQQLSGINAVFYYSTRIFEKAGVSQPVYATIGAGVVNTAFTVVSLFIVERAGRRSLHLTGLLGMAFSAVLMTVAMALLDQLPWMSYVSIVAIFSFVAFFEIGPGPIPWFIVAELFSZGPRPSAFAVAGFSNWSANFIVGMTFQYVEQLCGPYVFIIFTVLLLGFFVFTYFMVPETKGRSFDEIAAGFRHDAGEAGEKYAPDEMNSLGGADSQL

SEQ ID NO: 23828 - protein, 469 aa, Escherichia coli K12
MTGRCLFGFSGEKPFLLPDNEGVKMNTSPVRMDDLPLNRFHCRIAALTFGAHLTDGYVLGVIGYAIIQLTPAMQLTPFMAGMIGGSALLGLFLGSLVLGWISDHIGRQKIFTFSFLLITLASFLQFFATTPEHLIGLRILIGIGLGGDYSVGHTLLAEFSPRRHRGILLGAFSVVWTVGYVLASIAGHHFISENPEAWRWLLASAALPALLITLLRWGTPESPRWLLRQGRFAEAHAIVHRYFGPHVLLGDEVVTATHKHIKTLFSSRYWRRTAFNSVFFVCLVIPWFVIYTWLPTIAQTIGLEDALTASLMLNALLIVGALLGLVLTHLLAHRKFLLGSFLLLAATLVVMACLPSGSSLTLLLFVLFSTTISAVSNLVGILPAESFPTDIRSLGVGFATAMSRLGAAVSTGLLPWVLAQWGMQVTLLLLATVLLVGFVVTWLWAPETKALPLVAAGNVGGANEHSVSV

SEQ ID NO: 23829 - protein, 418 aa, Escherichia coli K12
MYQSRFTCTRNEVHLMSTRTPSSSSSRLMLTIGLCFLVALMEGLDLQAAGIAAGGIAQAFALDKMQMGWIFSAGILGLLPGALVGGMLADRYGRKRILIGSVALFGLFSLATAIAWDFPSLVFARLMTGVGLGAALPNLIALTSEAAGPRFRGTAVSLMYCGVPIGAALAATLGFAGANLAWQTVFWVGGVVPLILVPLLMRWLPESAVFAGEKQSAPPLRALFAPETATATLLLWLCYFFTLLVVYMLINWLPLLLVEQGFQPSQAAGVMFALQMGAASGTLMLGALMDKLRPVTMSLLIYSGMLASLLALGTVSSFNGMLLAGFVAGLFATGGQSVLYALAPLFYSSQIRATGVGTAVAVGRLGAMSGPLLAGKMLALGTGTVGVMAASAPGILVAGLAVFILMSRRSRIQPCADA

SEQ ID NO: 23830 - protein, 387 aa, Salmonella enterica subsp. enterica serovar Typhi
MPQPRNFDDLKFSSIHRRIMLWGSGGPFLDGYVLVIIGVALEQLTPLLHLDAEWIGALGAATLAGLFIGTSLFGYICDKVGRRKMFLLDIIAIGVISVATMFVSTPLELLVMRVLIGIVIGADYPIATSMITEFSNTRQRAFSIGFIAAMWYVGATCANLVGYWLYDMEGGWRWMLGSAFIPCLIILIGRFDLPESPRWLLRKGRVKECEQMMIKLFGEPVCFDDEPPQETRFLQLFNRRHFPFVLFVAAIWSCQVIPMFAIYTFGPQIVGLLGWEQGRNAALGNVVISLFFMLGCIPAMFWLNSIGRRPLLIGSFAMMTIALALLGLVSNLGIILVVVAFAVYAFFSGGPGILQWLYPNELFPTDIRASAVGVIMSLSRIGTIVST

SEQ ID NO: 23831 - protein, 161 aa, Ovis aries
FGRRNSMLIVNLLAIAGGCLMGFCKIAESVEMLILGRLIIGLFCGLCTGFVPMYIGEISPTALRGAFGTLNQLGIVIGILVAQIFGLKVILGTEDLWPLLLGFTILPAIIQCAALPFCPESPRFLLINRKEEEKAKEILQRLWGTEDVAQDIQEMKDESMR

SEQ ID NO: 23832 - protein, 753 aa, Hordeum vulgare subsp. vulgare
MRRGGWRSWRGCRGWRARRSSRLRRGWRRRRAGAGAGARKDLAALQAEWKSLEEEELVMAAAAKLVFLASNVMLWAPNVYVLLLARLIDGFGIGLAVTLVPLYISETAPTDIRGLLNTLPQFSGSGGMFLSYCMVFTMSLMPQPDWRIMLGVLSIPSLMYFALTVFYLPESPRWLVSKGRMAEAKRVLQRLRGREDVSGEMALLVEGLGVGKTHIEEYIIGPDDELADDGLAPDQEKLKLYGAEEGVSWIARPVRGGGQSALGSALGLMSRHGSMVSQGKSLVDPLVTLFGSVHEKMPEVMGSMRSTLFPNFGSMFSVAEQQQAKADWDAESHRDDEDYASDHGADDIEDNLNSPLISRQATSVEGKEIAAPHGSIMGGVESSSMQGGDAVSSMGIGGGWQLAWKWTEREGADGRKEGGAQRIYLHEEGVSGDRRGSILSMPGGDIPPGGEYIQAAALVSQPALYSKDLIEQQLAGPAMVHPSEAVAKGTKWAELFEPGVKHALFVGIGLQILQQFAGINGVLYYTPQILEQAGVGILLSNIGLSSSSASILISALTTLLMLGYISDRIGARAITAASFMYCSIPALFFYRRAILVLVNVLDVGTMVHAALSTISVIVYFCFFVMGPIPEGSTSSVKIDTDRANAASLAKALLTFWIGDIIVTYTLPVMLNAIGLAGVFGIYAVVCMIAFVFVYMKVPETKGMPLEVITEFFSVGAKQGKEATDEVAEKIAESRPSEECRSPVDYVQDHVMEV

SEQ ID NO: 23833 - protein, 513 aa, Apium graveolens var. dulce
MITGEVSVDSYDTNKPKPKRNKYAFACALLASMNSILLGYDTGVLSGASIYIKEDLHFSDVQIEIIIGIINIYSLLGSAIAGRTSDWIGRRYTMVLAGIIFFLGAIFMGLATNFAFLMFGRFVAGIGVGYAMMIAPVYTAEVAPSSSRGFLTSFPEVFINSGVLLGYVSNFAFAKCPLWLGWRIMLGIGAFPSVALAIIVLYMPESPRWLVMQGRLGEARTVLEKTSTSKEEAHQRLSDIKEAAGIDKDCNDDVVQVPKRTKDEAVWKELILHPTKPVRHAAITGIGIHFFQQACGIDAVVLYSPRIFEKAGIKSNSKKLLATIAVGVCKTVFILISTFQLDKIGRRPLMLTSMGGMVIALFVLAGSLTVINKSHHTGHWAGGLAIFTVYAFVSIFSSGMGPIAWVYSSEVFPLRLRAQGCSIGVAVNRGMSGIIGMTFISMYKAMTIGGAFLLFAVVASIGWVFMYTMFPETQGRNLEEIELLFGSYFGWRKTLKDLKAKEAAEAKSRESEV

SEQ ID NO: 23834 - protein, 459 aa, Escherichia coli O157:H7 EDL933
MDQITKPHCGARLDRLPDCRWHSSMFAIVAFGLLVCWSNAVGGLILAQLKALGWTDNSTTATFSAITTAGMFLGALVGGIIGDKTGRRNAFILYEAIHIASMVVGAFSPNMDFLIACRFVMGVGLGALLVTLFAGFTEYMPGRNRGTWSSRVSFIGNWSYPLCSLIAMGLTPLISAEWNWRVQLLIPAILSLIATALAWRYFPESPRWLESRGRYQEAEKVMRSIEEGVIRHTGKPLPPVVIADDGKAPQAVPYSALLTGVLLKRVILGSCVLIAMNVVQYTLINWLPTIFMTQGINLKDSIVLNTMSMFGTPFGIFIAMLVMDKIPRKTMGVGLLILIAVLGYIYSLQTSMLLITLIGFFLITFVYMYVCYASAVYVPEIWPTEAKLRGSGLANAVGRISGIAAPYAVAVLLSSYGVTGVFILLGAVSIIVAIAIATIGIETKGVSVESLSIDAVANK

SEQ ID NO: 23835 - protein, 459 aa, Escherichia coli CFT073
MEQITKPHCGARLDRLPDCRWHSSMFAIVAFGLLVCWSNAVGGLILAQLKALGWTDNSTTATFSAITTAGMFLGALVGGIIGDKTGRRNAFILYEAIHIASMVVGAFSPNMDFLIACRFVMGVGLGALLVTLFAGFTEYMPGRNRGTWSSRVSFIGNWSYPLCSLIAMGLTPLISAEWNWRVQLLIPAILSLIATALAWRYFPESPRWLESRGRYQEAEKVMRSIEEGVIRQTGKPLPPVVIADDGKAPQAVPYSALLTGVLLKRVILGSCVLIAMNVVQYTLINWLPTIFMTQGINLKDSIVLNTMSMFGAPFGIFIAMLVMDKIPRKTMGMGLLILIAVLGYIYSLQTSMLLITLIGFFLITFVYMYVCYASAVYVPEIWPTEAKLRGSGLANAVGRISGIAAPYAVAVLLSSYGVTGVFILLGAVSIIVAIAIATIGIETKGVSVESLSIDAVANK

SEQ ID NO: 23836 - protein, 202 aa, Leuconostoc mesenteroides subsp. mesenteroides ATCC 8293
  unsure (1)..(202): unsure at all Xaa locations
MENGSTKRIASSFIYFFGAFGGILFGYDIGVMTGALPFLQKDWHLTDAGTIGWITSTLMLGAILGGALAGQLSDRLGRRRMILASSFIFAVGAIMAGVSPNNGVVWLLIARFLLGLAVGAASALVPSYMSEMAPAKNRGRLSGLNQLMIVSGMLLSYIVDYLLQGLPHTIAWRLMLGLXXXXXXXXXXXXXXXXXRHSVSHM

SEQ ID NO: 23837 - protein, 547 aa, Arabidopsis thaliana
MMKNLPEVGNGGGSGFPAVSVGNKKNKYQRMDSDAEESQNHREAEARNSRTRKYVMACAFFASLNNVLLGYGRFYLYNRILLLLLYFVDLQKDVGVMSGAVLFIQQDLKITEVQTEVLIGSLSIISLFGSLAGGRTSDSIGRKWTMALAALVFQTGAAVMAVAPSFEVLMIGRTLAGIGIGLGVMIAPVYIAEISPTVARGFFTSFPEIFINLGILLGYVSNYAFSGLSVHISWRIMLAVGILPSVFIGFALCVIPESPRWLVMKGRVDSAREVLMKTNERDDEAEERLAEIQLAAAHTEGSEDRPVWRELLSPSPVVRKMLIVGFGIQCFQQITGIDATVYYSPEILKEAGIQDETKLLAATVAVGVTKTVFILFATFLIDSVGRKPLLYVSTIGMTLCLFCLSFTLTFLGQGTLGITLALLFVCGNVAFFSIGMGPVCWVLTSEIFPLRLRAQASALGAVGNRVCSGLVAMSFLSVSRAITVGGTFFVFSLVSALSVIFVYVLVPETSGKSLEQIELMFQGGLERKDGEVELGDAERLVRKEQEF

SEQ ID NO: 23838 - protein, 557 aa, Glycine max
  unsure (1)..(557): unsure at all Xaa locations
LKGSNLRQFSQVRTSKRTQGPIGIRIKLMGFQENGNXGNGVVWNPLGSKXNKYKRMTSELPDDKHQQQVEERRSSTRKYVIACAIFASLNNVLLGXXDVGVMSGXAVIFIKEDLKISEVQVEFLIGILSIISLFGSLGGGRTSDIIGRKWTMALAAVVFQMGGLTMTLAPSYAVLMVGRFLAGIGIGFGVMISPIYIAEISPNLNRGSLTAFPEIFINVGIMLGYVSNYAFSGLSAHISWRVMLAVGILPSVFIGFALFVIPESPRWLVMQNRIDEARSVLLKTNEDEKEVEERLAEIQQAAGFANSDKYDDKPVWRELLFPPPPLRRMLITGLGIQCFQQISGIDATVYYSPEIFQAAGIEDNSKLLAATVAVGISKTIFILVAIILIDKLGRNTAARRRQKGMTVCLFCMGATLALLGKGSFAIALSILFVCGNVAFFSVGLGPVCWVLTSEIFPLRVRAQASALGAVANRVCSGLVAMSFLSVSEAISVAGTFFAFSAISALAIAFVVTLVPETKGKSLEQIEMMFQNEYEIQGKETELGDVEQLVQNQTDLTN

SEQ ID NO: 23839 - protein, 417 aa, Glycine max
RTSDIIGRKWTMALAAVVFQMGGLTMTLAPSYAVLMVGRFLAGIGIGFGVMISPIYIAEISPNLNRGSLTAFPEIFINVGIMLGYVSNYAFSGLSAHISWRVMLAVGILPSVFIGFALFVIPESPRWLVMQNRIDEARSVLLKTNEDEKEVEERLAEIQQAAGFANSDKYDDKPVWRELLFPPPPLRRMLITGLGIQCFQQISGIDATVYYSPEIFQAAGIEDNSKLLAATVAVGISKTIFILVAIILIDKLGRKPLLMISTIGMTVCLFCMGATLALLGKGSFAIALSILFVCGNVAFFSVGLGPVCWVLTSEIFPLRVRAQASALGAVANRVCSGLVAMSFLSVSEAISVAGTFFAFSAISALAIAFVVTLVPETKGKSLEQIEMMFQNEYEIQGKETELGDVEQLVQNQTDLTN

SEQ ID NO: 23840 - protein, 506 aa, Oryza sativa (japonica cultivar-group)
MGEEKQNDERKNKYAVGCSIIGSIISVLMGYDTGVMSGAMLFIKEDLKTNDTQVQVLAGILNVCALVGSLTAGRVSDCVGRRLTISLAACIFLVGSVLMGLAPNFATLLAGRCVAGVGVGYALMIAPVYAAEIASADIRGSLTSLPEICISFGILIGYVANYLLAKLPLVYGWRAMLGLGALPSAALALGVLAMPESPRWLVVQGRAEEALSVLRRVCDRPSEADARLAEIKAAAGLADDDGAAANAGSGGKGVWRELFLHPTPPVRRIVIAALGIHFFQHLTGIEAVVLYSPRIFKAAGIASRNSVLAATIGVGVTKTAFILTAILLVDRIGRRPLYLSSLAGIIASLACLGMGLTVIERSPPHHSPAWAVVLAIATVFTFVASFSIGVGPITWAYSSEVYPLRLRAQGASVGVAINRVMNAGVSMTFVSLYKAITIGGAFFLFAGLAVAAATFFYLLCPETQGKPLEEIEEVFSQGWRARRRASAAAVEMPASGGGGGGGAPMA

SEQ ID NO: 23841 - protein, 511 aa, Oryza sativa (japonica cultivar-group)
MTSQLGSARRPSKFQPLQINYICGASLFIKEDMKITDVEVEILLGILNLYSLVGSFAAGRTSDWIGRRLTIILAAVIFFVGAIMMGLSVNYPMLMAGRFVAGIGVGYAFMIAPVYTAEVSPASSRGFLTSFPEVFINFGILLGYVSNYAFSRLRLQLGWRLMLGVGAAPSVALALMVLAMPESPRWLVMKGRLADAKVVLGETSDTAEEAATRLAEIKEAVAIPADLDGDVVAVPKRAGGERRVWKELILSPTPAVRRVLLSALGIHFFQQSSGIDAVVLYSPRVFQSAGITDKNKLLGTTCAVGVTKTLFILVATFTLDRFGRRPLLLASAGGMIATLVTLGLGLTVIGEDATGGGWAIAVSIASILAFVAFFSIGLGPITWVYSSEIFPLHLRALGCALGVGLNRVTSGVISMTFLSLSKAITIGGSFFLYAGVASLAWLFFFTYLPETRGRTLEQMGELFRIHNMAGDDDSAATRPPSPEEEEKITNYVEMAAPSSSSSTATSSHHAK

SEQ ID NO: 23842 - protein, 521 aa, Oryza sativa
MAGAEAANGRNKYAVLDPSDEPEGRRRPSAWERRSKERFVLACAIFASLNAILLGYDVGVMSGAIIYIQKDLHITEFQEEILVGCLSVVSLLGSLSGGRTSDAIGRKWTMALGAIVFQAGAAIMTFAPSFTVLMIGRLLAGVGIGFGAMVSAVYIAEISPAAARGTLTSLPEICINLGILLGYVSNYAFSGLSEHINWRIMLGVGILPSVFIGFALFVIPESPRWLMMEKRVPEARAVLLQISESEAEVEERIAEIEEAANQSTKSEDKAVWMELLNPSPAVRRMLYAGCGIQMFQQITGIDATVYYSPTIFRDAGIKSDQELLAATVAVGFTKTVFILVAIFLIDKVGRKPLLYVSTIGMTMCLFVLGIALTLQKHAMGLISPRIGIDLAVFAVCGNVAFFSIGMGPICWVLSSEIFPLRLRAQASALGQVGGRVSSGLVSMSFLSMARIISVAGMFFVFAVISTVSVAFVYFCVPETKGKTLEQIEMMFEGGKEWRGSEIELEDTQHLIQSSKKSVSLG

SEQ ID NO: 23843 - protein, 547 aa, Oryza sativa
  unsure (1)..(547): unsure at all Xaa locations
WIAGSPEGGGDGGRGXAANGRNKYAVLDPSDEPEGRRRPSAWERRSKERFVLACAIFASLNAILLGYGEFIFYNPVLMLYLXDVGVMSGAIIYIQKDLHITEFQEEILVGCLSVVSLLGSLSGGRTSDAIGRKWTMALGAIVFQAGAAIMTFAPSFTVLMIGRLLAGVGIGFGAMVSAVYIAEISPAAARGTLTSLPEICINLGILLGYVSNYAFSGLSEHINWRIMLGVGILPSVFIGFALFVIPESPRWLMMEKRVPEARAVLLQISESEAEVEERIAEIEEAANQSTKSEDKAVWMELLNPSPAVRRLLSTHCGRQMFQQITGIDATVYYSPTIFRDAGIKSDQELLAATVAVGFTKTVFILVAIFLIDKVGRKPLLYVSTIGMTMCLFVLGIALTLQKHAMGLISPRIGIDLAVFAVCGNVAFFSIGMGPICWVLSSEIFPLRLRAQASALGQVGGRVSSGLVSMSFLSMARIISVAGMFFVFAVISTVSVAFVYFCVPETKGKTLEQIEMMFEGGKEWRGSEIELEDTQHLIQSSKKSVSLG

SEQ ID NO: 23844 - protein, 536 aa, Oryza sativa
  unsure (1)..(536): unsure at all Xaa locations
MGLPGAEPPAASGGGLPGFFGGKSKYVRMDDVLPQEQEEEEAEASASXRSHSSRRYVFACSVFASLNSVLLGYDVGVMSGCILFIQRDLHINEVQQEVLVGCLSFISLLGSLAGGRTSDAVGRKWTIGLAAIVFQAGAAVMTLAPSFEVLMVGRLLAGVGIGFGVMIAPVYIAEISPAASRGSFTSFPEIFINLGILLGYISNYAFSGLPDHVSWRVMLAVGILPSVSIAFALLVIPESPRWLVMKNRADEAREVLLKVTDSEDEAKERLAEIERAAAAVASAGKYGDKTVWQELTRPSPVIRRMLITGLGIQCFQQITGIDALVYYSPTIFRDAGITTESQLLVATVAVGFFKTAFIALAIVLIDRVGRKPLLYVSTVGMTACLVVLAATLAALAHGSASRSAGIAVAILTVCGDVAFFSVGIGPICWVMSSEIFPLRLRSQAAALGAVMNRVTSGAVAMSFLSVCRAISVAGAFSVFAVISALSVVFVYRYVPETSGKTLEEIELLFGGGGGDGEAARGEVELGDGEHLVHKGX

SEQ ID NO: 23845 - protein, 563 aa, Oryza sativa
  unsure (1)..(563): unsure at all Xaa locations
AEGMGLPGAEPPAASGGGLPGFFGGKSKYVRMDDVLPQEQEEEEAEASASXRSHSSRRYVFACSVFASLNSVLLGYGNYLLRFHMNLSRTYMCSLFPDVGVMSGCILFIQRDLHINEVQQEVLVGCLSFISLLGSLAGGRTSDAVGRKWTIGLAAIVFQAGAAVMTLAPSFEVLMVGRLLAGVGIGFGVMIAPVYIAEISPAASRGSFTSFPEIFINLGILLGYISNYAFSGLPDHVSWRVMLAVGILPSVSIAFALLVIPESPRWLVMKNRADEAREVLLKVTDSEDEAKERLAEIERAAAAVASAGKYGDKTVWQELTRPSPVIRRMLITGLGIQCFQQITGIDALVYYSPTIFRDAGITTESQLLVATVAVGFFKTAFIALAIVLIDRVGRKPLLYVSTVGMTACLVVLAATLAALAHGSASRSAGIAVAILTVCGDVAFFSVGIGPICWVMSSEIFPLRLRSQAAALGAVMNRVTSGAVAMSFLSVCRAISVAGAFSVFAVISALSVVFVYRYVPETSGKTLEEIELLFGGGGGRRRGGAGXEVELGDGEHLVHKGXGS

SEQ ID NO: 23846 - protein, 530 aa, Oryza sativa
  unsure (1)..(530): unsure at all Xaa locations
MGLRATEAATGNGGGMRSLPVLGRKSKYVRMDDVLPDEQGDGGGGXRRRSCPRRRRQRXRYVFACSVFASLNHVLLGYDVGVMSGCIIFIQKDLHISEVQQEVLVGCLSFISLLGSLAAGRTSDAVGRKWTIGLAAAVFQAGAAVMTLAPSFAVLMMGRLLAGIGIGIGIMVAPVYISEITPATLRGSYASFPEIFISLGILLGYVSNLAFSGLPDHINWRVMLAAGIVPSISVAFVLLVIPESPRWLVMQGRAAKARAVLLKVTDGEDEAQERLAEIEEAARVTATGNGKAVWRELLRPSPVIRRMLVTGIGVQLFQQITGIDALVYYSPTIFRDAGITTESQLLAATVGVGLSKTVFIVIAIVLVDRVGRKPLLYVSTAGITACLAALAASLSLLAHGALPRAAAIGAAHXLTVCGFVAFFSVGIGPINMVLSSEIYPLRLRAQAXXTSGPVPMSFLSFSAPVSVPGAXFAAFAAFSALSVVFVHVFVPEMSGKSLEQIESLFGAGAXXPGEVKLGNAEHLVQGKEMS

SEQ ID NO: 23847 - protein, 558 aa, Oryza sativa
  unsure (1)..(558): unsure at all Xaa locations
MGLRATEAATGNGGGMRSLPVLGRKSKYVRMDDVLPDEQGDGGGGXRRRSCPRRRRQRXRYVFACSVFASLNHVLLGYGKYLCTNCQILCYIVAVNXSDVGVMSGCIIFIQKDLHISEVQQEVLVGCLSFISLLGSLAAGRTSDAVGRKWTIGLAAAVFQAGAAVMTLAPSFAVLMMGRLLAGIGIGIGIMVAPVYISEITPATLRGSYASFPEIFISLGILLGYVSNLAFSGLPDHINWRVMLAAGIVPSISVAFVLLVIPESPRWLVMQGRAAKARAVLLKVTDGEDEAQERLAEIEEAARVTATGNGKAVWRELLRPSPVIRRMLVTGIGVQLFQQITGIDALVYYSPTIFRDAGITTESQLLAATVGVGLSKTVFIVIAIVLVDRVGRKPLLYVSTAGITACLAALAASLSLLAHGALPRAAAIGAAHXLTVCGFVAFFSVGIGPINMVLSSEIYPLRLRAQAVALGFSVNRLTSGPVPMSFLSFSAPVSVPGAXFAAFAAFSALSVVFVHVFVPEMSGKSLEQIESLFGAGAXXPGEVKLGNAEHLVQGKEMS

SEQ ID NO: 23848 - protein, 485 aa, Oryza sativa
  unsure (1)..(485): unsure at all Xaa locations
MGLRATEAATGNGGGMRSLPVLGRKSKYVRMDDVLPDEQGDGGGGXRRRSCPRRRRQRXRYVFACSVFASLNHVLLGYDVGVMSGCIIFIQKDLHISEVQQEVLVGCLSFISLLGSLAAGRTSDAVGRKWTIGLAAAVFQAGAAVMTLAPSFAVLMMGRLLAGIGIGIGIMVAPVYISEITPATLRGSYASFPEIFISLGILLGYVSNLAFSGLPDHINWRVMLAAGIVPSISVAFVLLVIPESPRWLVMQGRAAKARAVLLKVTDGEDEAQERLAEIEEAARVTATGNGKAVWRELLRPSPVIRRMLVTGIGVQLFQQITGIDALVYYSPTIFRDAGITTESQLLAATVGVGLSKRTAGITACLAALAASLSLLAHGALPRAAAIGRPILTVCGFVAFFSVGIGPINMXXTSGPVPMSFLSFSAPVSVPGAXFAAFAAFSALSVVFVHVFVPEMSGKSLEQIESLFGAGAXXPGEVKLGNAEHL

SEQ ID NO: 23849 - protein, 262 aa, Triticum aestivum
  unsure (1)..(262): unsure at all Xaa locations
XRMLVTGLGIQCFQQITGIDALVYYSPTIFRDAGVTTESQLLLATVAVGFFKTAFIALAIVLIDRVGRKPLLYVSTVGMTVCLVILASTLWLLAHGAVPKALXGVAVAVVAVCGDVAFFSVGIGPVCWVTSSEIFPLRLRSQAAALGAAVNRVTSGTVAMSFLSVSRAMTVAGAFSAFAAISALSVVFVHRFVPETKGKTLEEIELLFGGGEGGEGVTVSPGEVELGDAEHLVRKGXEGPCTLMDPFGIVTPVWMFSFRMCI

SEQ ID NO: 23850 - protein, 352 aa, Triticum aestivum
  unsure (1)..(352): unsure at all Xaa locations
PTRPPTRPLLSYVSNYALAGLPVHLSWRVMYAIGVLPPVLLAAGVLAMPESPRWLAMRGREADARAVLVGTSDTAAEAELRFEEIKRVVEAPREADSXXVWRELIFRPSAMVRRILVFVVGLNFLQQALGVDAILLYSPLMFKKAGMSSNSAILGATVAIGVVKTCFILVVSLFSDRFGRRPLLLASAGGVAASLTGLALTLCIGGRRQRARLPXVAFTLATVAAFSVGWGSLPSTYTAEITPLRLRAQGSSLGMAVNRLTCGVVSMSFISLAGWITMPGCFFLYASMAATAYVFVFLRLPETKGRTLEEMDVLFSDRDQXKASTPQKKKKKSLSIPSTSRGGPVPNSXXXX

SEQ ID NO: 23851 - protein, 545 aa, Caenorhabditis elegans
MVEAPSFRMICVAVITSIAGSFHFGFNLVLTNPSQEAFLNFMNQTLAKRFDGGLSDNTLQNIWSFVVAILFLGALAGSFSIRLIADWIGRKNGLYISIAVGVLAGGMSIASKFIPLFELYIASRIVMGWSVSVSLGLSALFLSEASPKQNRGAIGMMTGTCVQLGTVCGSVIAMPQIFGTEDLWWLIYATEIGIMLFFGAALPFFPESPGFLIQRGATEAATKSIAYYYNCEIDEAEKHLNEIKEEQKNSTKNFKMMDIVRKKSLRDKAFIGVVVTFAMSFSGVAVINAFAFDILKDTGLKVLEASLANDAISVVSMISSIVAAVIVDRNGRRPLLLISFAGILVCNLIIFALMFTFYKFEWCFYVAKIFLIFLGLKIAITLHKKLVSIFQNHVLGFILICFICIFTFFFALGPGPLCYFINAELVGQAARSAAQSWASVIQMLSRFVIVTAFLPMKNQLGEAWSYLILFVAPVAASLVYLYFSLPETKNKNPFEVEEAIEDLPKFPLCGKNRVYDRKQSQEMVLSRQMQLVVDYGSIESLSYRL

SEQ ID NO: 23852 - protein, 459 aa, Escherichia coli K12
MEQITKPHCGARLDRLPDCRWHSSMFAIVAFGLLVCWSNAVGGLILAQLKALGWTDNSTTATFSAITTAGMFLGALVGGIIGDKTGRRNAFILYEAIHIASMVVGAFSPNMDFLIACRFVMGVGLGALLVTLFAGFTEYMPGRNRGTWSSRVSFIGNWSYPLCSLIAMGLTPLISAEWNWRVQLLIPAILSLIATALAWRYFPESPRWLESRGRYQEAEKVMRSIEEGVIRQTGKPLPPVVIADDGKAPQAVPYSALLTGVLLKRVILGSCVLIAMNVVQYTLINWLPTIFMTQGINLKDSIVLNTMSMFGAPFGIFIAMLVMDKIPRKTMGVGLLILIAVLGYIYSLQTSMLLITLIGFFLITFVYMYVCYASAVYVPEIWPTEAKLRGSGLANAVGRISGIAAPYAVAVLLSSYGVTGVFILLGAVSIIVAIAIATIGIETKGVSVESLSIDAVANK

SEQ ID NO: 23853 - protein, 246 aa, Ovis aries
MAAMQFLWGSAPGWEEPPTGAEHQGFHVAQLRCPGIYKPFIIGISLMAFQQLSGVNAVMFYAETIFEEAKFKDSSLASVVVGVIQVLFTATAALIMDRAGRRLLLTLSGVVMVFSTSAFGAYFKLTEGGPSNSSHVDLPAPVSMEPANTNVGLAWLAVGSMCLFIAGFAVGWGPIPWLLMSEIFPLHVKGVATGVCVLTNWFMAFLVTKEFSSLMEVLRPYGAFWLASAFCIFGVLFTLACVPETK

SEQ ID NO: 23854 - protein, 497 aa, Mus musculus
MQEPLLRTEGLDYDTFPEVPATPGERERAGALKNRRVFLATFAAVLGNFSFGYALVYTSPVIPELKLSSDPALHLDKIQASWFGSVFTLGAAAGGLSAMLLNDLLGRKLSIMFSAVPSAIGYAIMAGARGLWMLLLGRMLTGFAGGLTAACIPVYVSEIAPPDVRGALGATPQLMAVFGSLSLYALGLLLPWRWLAVAGEGPVLIMILLLSFMPNSPRFLLSKSRDEEALQALTWLRADSEVHWEFEQIQDNVRRQSSRVSWAEAREPRVYRPVLIAVLMRFLQQLTGITPILVYLQTIFDNTSVVLPSQQDAAIVGAVRLLSVLIAAVTMDLAGRKVLLYVSASVMFAANLTLGLYVQFVPRPLTPNSTVEIVILGDTAFNYLTLIPLLATMLFIMGYAMGWGPITWLLMSEVLPLRARGVASGLCVLVSWLTAFVLTNYFLLAVNAFGLQVPFFFFSAICLLSLLFTGCCVPETRGRSLEQIEAFFHTRRMSFRP

SEQ ID NO: 23855 - protein, 523 aa, Apium graveolens var. dulce
MAGAFNVSGDDSGGSKDVGSPVIFDAVKKPKRNKYAFGCAILASMTSVLLGYDIGVMSGAAIYIKDQLHVSDVKLEIVVGIINFFSLVGSALAGRTSDWIGRRYTMVLAGAIFFVGAILMGFATNYSFLMFGRFVAGIRSRLCPHDCSGVHGRGFFSIISWISYFIPGSFINIGVLLGYVSNYAFSKLPANLGWRFMLGIGAIPSIGLAIGVLGMPESPRWLVMKGRLGEARQVLDKTSDSKEESRLRLSDIKQAAGIPEECNDDIVVMPKRRNDEAVWKELLLHPTPSVRHAFIAGVGLHFFQQSSGIDAGGLYSPRIFEKAGITSTDLKLLATIAVGISKTLFILVATFLLDRIGRRPLLLTSMGGMIISLTLLGTSLAVIATQITQFIGPGHWQSSEVYHTWAVFFWLGPIAWGYSSEVFPLRLRAQGCSIGVAVNRGTSGIISMTFLSLYKAISIAGAFYLFAAIAGVAWIFIFTLLPETQGRSLEEMGLLFGTYFGWRKTLKGLKNREAEEAKNANVI

SEQ ID NO: 23856 - protein, 514 aa, Ralstonia metallidurans
MVESPVAPLFRPREPARQEEDQHAKHYSVQNTPGKEPSIPGRQSDIPARLDRLPWSAWHWRVAIALGIAWVLDGLEVTLVGSVGAVLERPDTLALNATQVGWSGSLYVLGAVIGALAFGRMADRLGRKKLFLATLFVYMAATLATAFSPNFAFFAACRFVTGLGIGGEYAAINSAIDELIPARVRGRVNLAINGSFWLGAALGAGLSLLLLDPRVLGPVWGWRACFALGALLAVAIVLIRRHVPESPRWLATHGRHAEAEQVIAGIEAAITRRHGPLPPVHDAVLVYYGGKPVPPLRDVVRLLVRRYRTRSAVTFALMVAQAFFYNAIFFTYALVLTRFLGVPEERVALYIFPFAIGNALGPLLLGPLFDRIGRRKMIALTYVLSGIGLAATGWAFMSGWLDARSQALCWSAVFFLASAAASSAYLTASEVFPLEMRALAISVFYAVGTGVGGFIAPVLFGALIETGSRGAVAVGYAIGATLVIVAGAMALKYGVDAERKPLEEVAPPLGTDDE

SEQ ID NO: 23857 - protein, 487 aa, Burkholderia fungorum
MASPDHAGSVANSSGAVYSDTAATSARAATPLDAGSISARLDRLPATRSIWKLVVLLSLGFFFELYDLLYSGYVAPGLVKSGLLTATTHGLFGSTGVASFIAALFSGLFIGTIACGFLADRFGRRAVFTYSLLWYTAANIVMAFQETATGLNFWRFLAGIGIGVELVTIGTYISELVPKQIRGRAFACEQAVGFTAVPVVAFLSYLLVPRTLLGLDGWRWVVLIGAHGALFVWWIRRALPESPRWLAQQGRLAEADRVMTELEAKVRREYGRELPPPAPPVPVAPRGSFRDMWVPPYRSRTLMMTIFNIFQTVGFYGFANWVPTLLIKQGITITTSLMYSSVIALAAPLGPVIGLFIGDRFERKTVIVVMAGVNIVCGLWFSQAAGAVLLVSLGVGLTLAGNIISYSFHAYQAELFPTSIRARAVGFVYSWSRFSAIFTAFLIAAVLKHFGTGGVFVFIAGAMLIVMLAIGLMGPRTNGIELEKISK

SEQ ID NO: 23858 - protein, 509 aa, Prunus cerasus
MTDRRAQDNAVSGQPLLKKKPKRNLYAIGCAILASMTSILLGYDIGVMSGASIYIQKDLKISDVEVEILIGILNLYSLIGSAAAGRTSDWIGRRYTIVFAGAIFFTGALLMGLATNYAFLMVGRFVAGIGVGYALMIAPVYNAEVSPASSRGALTSFPEVFVNIGILLGYVANYAFSGLPIDLGWRLMLGVGVFPSVILAVGVLSMPESPRWLVMQGRLGEAKQVLDKTSDSLEEAQLRLADIKEAAGIPEHCVEDVVQVPKHSHGEEVWKELLLHPTPPVRHILIAAIGFHFFQQLSGIDALVLYSPRIFEKAGITDSSTLLLATVAVGFSKTIFTLVAIGFLDRVGRRPLLLTSVAGMIASLLCLGTSLTIVDHETEKMMWASVLCLTMVLAYVGFFSIGMGPIAWVYSSEIFPLKLRAQGCSMGTAVNRIMSGVLSMSFISLYKAITMGGTFFLYAGIATVGWVFFYTMLPETQGRTLEDMEVLFGKFWRWREGYALLRNKRAVVC

SEQ ID NO: 23859 - protein, 538 aa, Prunus cerasus
MADRRAEYNAVVSGQPQKNIADFDPPGKPKRNKYAFACAILASMTSILLGYDIGVMSGAVIYIKKDLKVSDVEIEVLVGILNLYSLIGSAAAGRTSDWIGRRYTIVLAGAIFFAGALLMGFAPNYAFLMFGRFVAGIGVGYALMIAPVYTAEVSPASSRGFLTSFPEVFINAGILFGYVSNYGFSKLPTHLGWRLMLGVGAIPSIFLAIGVLAMPESPRWLVMQGRLGDARKVLDKTSDSLEESKLRLGEIKEAAGIPEHCNDDIVEVKKRSQGQEVWKQLLLRPTPAVRHILMCAVGLHFFQQASGIDAVVLYSPRIFEKAGITNPDHVLLCTVAVGFVKTVFILVATFMLDRIGRRPLLLTSVAGMVFTLACLGLGLTIIDHSGEKIMWAIALSLTMVLAYVAFFSIGMGPITWVYSSEIFPLQLRAQGCSIGVAVNRVVSGVLSMTFISLYKAITIGGAFFLFAAIAAVGWTFFFTMLPETQGRTLEDMEVLFGKFYRWRKANALLKQKKQVDHGDGNNNPNNPQIQLGTKGQAN

SEQ ID NO: 23860 - protein, 416 aa, Escherichia coli O157:H7 EDL933
MSYSGNVVLAKLVSNGWSNNFLNAAFTSALMFGYFIGSLTGGFIGDYFGRRRAFRINLLIVGIAATGAAFVPDMYWLIFFRFLMGTGMGALIMVGYASFTEFIPATVRGKWSARLSFVGNWSPMLSAAIGVVVIAFFSWRIMFLLGGIGILLAWFLSGKYFIESPRWLAGKGQIAGAECQLREVEQQIEREKSIRLPPLTSYQSNSKVKVIKGTFWLLFKGEMLRRTLVAITVLIAMNISLYTITVWIPTIFVNSGIDVDKSILMTAVIMIGAPVGIFIAALIIDHFPRRLFGSTLLIIIAVLGYIYSIQTTEWAILIYGLVMIFFLYMYVCFASAVYIPELWPTHLRLRGSGFVNAVGRIVAVFTPYGVAALLTHYGSITVFMVLGVMLLLCALVLSIFGIETRKVSLEEISEVN

SEQ ID NO: 23861 - protein, 490 aa, Beta vulgaris
MSSDSEAGLGGGGGDLRKPFLHTGSWYRMGSRQSSLMGSSQVIRESSISVLACVLIVALGPIQFGFTAGYSSPTQSAITNELGLSVAEYSWFGSLSNVGAMVGAIASGQISEYIGRKGSLMIAAIPNIIGWLAISFAKDSSFLYMGRMLEGFGVGIISYTVPVYISEIAPQNLRGALGSVNQLSVTIGIMLSYMLGLFVPWRILAVLGILPCTILIPGLFFIPESPRWLAKMGMMEEFEVSLQVLRGFDTDISLEVNEIKRSVASSSKRTTIRFAELRQRRYWLPLMIGNGLLILQQLSGINGVLFYSSTIFKEAGVTSSNAATFGLGAVQVIATVVTTWLVDKSGRRLLLIVSSSGMTLSLLVVAMSFFLKEMVSDESTWYSVFSILSVVGVVAMVVTFSLGIGAIPWIIMSEILPINIKGLAGSIATLANWFVAWIVTMTANIMLSWNSGGTFSIYMVVCAFTVAFVVIWVPETKGRTLEEIQWSFRR

SEQ ID NO: 23862 - protein, 493 aa, Anopheles gambiae str. PEST
SVMVRIAWTDLKPFAPTVILVRSWCARMGKLPYYFAHQNQYIAALAASYGVLTIGMVFGWSAPAGPQILENGEGNLNLTDDQFSWTIAFMPIGGAIAAIPCGIMLKSEGRKNTILFFVLPLLLGWVLLTWAQAIVMMYLGRLLQGFAAGAYSMSVPIYIGEIADQRIRGTVGSFFQLMLNLGMLMSFSISAGVNVFQLNIISGFIVLLFGPIFMLMPETPSFLLKRGHKTKAVETLKWLRGPKCDAFYEIEQLQLEQDALLNQPKKSIKKSLFTPETLSALLAMIGLVTFLQMSGINAVLFYATDIFMNASDSLNHEVATIIVGAMQFFGTLLAAFTVDRVGRRWLLMISAIIMCVSHVVLGVYFHLLQNSPAQVENLEWLPVFALSLFVTMFSIGFGPVPWIMIGEVFAIDVKDLASSLATFTSYALSFMMTKTFNPLRNGLGEAGTFWLFGGFCMLGAIFVFLFVPETKGKTFDQIQKRLASSKVYFRAEN

SEQ ID NO: 23863 - protein, 431 aa, Anopheles gambiae str. PEST
GTLLMLSVAASYGWTSPTLPLLLSDDSPLPITPDESSWIVSILVLTSIAGPVATAWLIDGFGRKVTLLIAVLPSIVGWILIGVGESVTVLYISRALSGISYGMAYSSMPLYLGEIASDRIRGSIGTLLTVMAKSGILLEYVIGPYVDYRTLAWISVAFPTTFFALFLWLPESPYYLLAKQRNEQAEKNLRWLRRASDVQDELRMMQAAVERSQQNRGTFRDLLTRGNRRSLIIILGLGALQQLCGSQAVIAYSQQIFDQVNSGLKAHESSIIMAVIQLVTAALSSSIVDRVGRRPLLLISTVGCAVGTFIVGLYFFLLQQEVDVEGVGWIPLAVIMIYIVFYTVGLATVPFAILGEIFPTNVKAVAAAIYTMFAGSVGFGVSKLYQLISDEAGTYVSFWIFAACSAAFVVFVFALVPETKGKPLDQILIEM

SEQ ID NO: 23864 - protein, 529 aa, Anopheles gambiae str. PEST
YYTAFLFKMTGKDSVVLVDKDTVPQIMATGEKKGAMVTLATVESQPNKAAERGKAMRQVIAAFVANIGTINTGLIFGFSAVVIPQLQAADSLIPVDESQSSWVASLSAIGTPIGCLLSGYVMDNFGRKKALIATQIPTIIGWIVIACASNVGMIYAGRVLTGFGSGMVGAPARVYTSEVTQPHLRGMLCALASTGISLGVLIQYTLGAFTTWKFLSGVSIIVPVAALILMLLMPETPNYLVSKQKPEKARRSLARLRGSSYNIDREVEQLQSFAAKTNASGKKSLSLRETVQALVHPSCLKPFAILTIYFMMYQFSGVNTITFYAVEIFRDSGTTMDKNTCTILLGVVRLIFTIVGAILLRRCGRRPLTFISGIGCGFTMVGLGVYLYFKHQWDTAVPPIEPTATWFPVACIFIFITTCTVGFLVVPWVMIGELYPMKVRGLVGGFTTCMAHSFVFIVVKTYPFLTHVLERHGTFILYGCFSFVETKGKTLQEIEDYFSGRTKTLKKPKAGTNGQQNDENDGQQMLLAN

SEQ ID NO: 23865 - protein, 449 aa, Anopheles gambiae str. PEST
WSSPALPVLRGPNSPIPITPDEGSWVVSLLSIGSLFGPIICGLFVDRYGRKPVLLISAVPLVAGWLFIVFAESVGMLYTARLLHGIGYGLAYSLTPIYLGEISSNAVRGSTAVLVTVMAKLAFLFEYSVGPYVGFRALAWISLALPVGFVVLFFWMPETPYYLLARGNKKAAADSLRWLRRSSTIDEELGRMEKLVLESKQKGNPLKQLLLTSSNKKSLVIILLLSFGMQLTGINAILGYSQTIFSRLALPLTAAELSIVLALVQLGSVMLPTFLVDRAGRRPLLLASTAGSFIGLAVCAVYFTLDETTTDVLSPEPGAAHGWIPFVGVLLFIISFAIGLATVPFAILGEVFPKHIKAAANSVFAVITSAVVFSVVKLFQVISDGAGTYVSFWIFTGCTAMTGVLIYLIIPETKGQSFERIQEIMMRRGRSNETGRECGSGAKGRPLLC

SEQ ID NO: 23866 - protein, 449 aa, Agrobacterium tumefaciens str. C58 (U. Washington)
MQGRGDADPYRMARSCVKGRNMSTNYLSAASVRTKNPAGVIATCGLMIMFDGYDLVVYGAVAPALLKESTWALNPAMVGRAAALTLVGMLLGALFAGTMADRIGRRKVVLLSLAGFSAMMIASAMTPNFLAFEITRFFAGLGLGALLPTVTALVLEFSPPQRRAQANSLSFLGYLIGGIISGILGMLLLESYGWRPLMLIGGLPLILLPIFMRFLPESPEWLASKGRQAEADGICDSYGLQRIVPHAKMQKGGVGALFSEGRLASTLNAWGIHFCSLLLTFGMVNWLPTIMNKMGYDISSALSFSVMLNVGAAIGILIGGRFADKGNVKVVVAILFAVGAASIFALTANKGPLLYVFVALAGAGTIGTQILANVLVGRLYPVHIRGTGLGFSLAVGRLGGIAGPMIGGLVLQRGLAPEWNFYIFGSVAVVGLMLTVLTLLYRTSGDARV

SEQ ID NO: 23867 - protein, 477 aa, Agrobacterium tumefaciens str. C58 (Cereon)
MASDIGDVWLDRSKAHIRVEPAGHSRRIMQGRGDADPYRMARSCVKGRNMSTNYLSAASVRTKNPAGVIATCGLMIMFDGYDLVVYGAVAPALLKESTWALNPAMVGRAAALTLVGMLLGALFAGTMADRIGRRKVVLLSLAGFSAMMIASAMTPNFLAFEITRFFAGLGLGALLPTVTALVLEFSPPQRRAQANSLSFLGYLIGGIISGILGMLLLESYGWRPLMLIGGLPLILLPIFMRFLPESPEWLASKGRQAEADGICDSYGLQRIVPHAKMQKGGVGALFSEGRLASTLNAWGIHFCSLLLTFGMVNWLPTIMNKMGYDISSALSFSVMLNVGAAIGILIGGRFADKGNVKVVVAILFAVGAASIFALTANKGPLLYVFVALAGAGTIGTQILANVLVGRLYPVHIRGTGLGFSLAVGRLGGIAGPMIGGLVLQRGLAPEWNFYIFGSVAVVGLMLTVLTLLYRTSGDARV

SEQ ID NO: 23868 - protein, 487 aa, Shigella flexneri 2a str. 301
MSILFVPATGNKMMIKMRQVNLPQLLPFIANPRHPMEQYDQIGARLDRLPLARFHYRIFGIISFSLLLTGFLSYSGNVVLAKLVSNGWSNNFLYAAFTSALMFGYFIGSLTGGFIGDYFGRRRAFRINLLIVGIAATGAAFVPDMYWLIFFRFLMGTGMGALIMVGYASFTEFIPATVRGKWSARLSFVGNWSPMLSAAIGVVVIAFFSWRIMFLLGGIGILLAWFLSGKYFIESPRWLEGKGQIAGAESQLREVEQQIEREKSIRLPQLTLNQSNSKVKVIKGTFRLLFKGEMLRRTLVAITVLIAMNISLYTITVWIPTIFVNSGIDVDKSILMTAVIMIGAPVGIFIAALIIDHFPRRLFGSALLIIIAVLGYIYSSQTTEWAILIYGLVMIFFLYMYVCFASAVYIPELWPTHLRLRGSGFVNAVGRIVAVFTPYGVAALLTHYGSITVFMVLGVMLVLCALVLSIFGIETRKVSLEEISEVN

SEQ ID NO: 23869 - protein, 475 aa, Escherichia coli CFT073
MMIKMRQVNLPQLLPFLANPRHPMEQYDQIGARLDRLPLARFHYRIFGIISFSLLLTGFLSYSGNVVLAKLVSNGWSNNFLNAAFTSALMFGYFIGSLTGGFIGDYFGRRRAFRINLLIVGIAATGAAFVPDMHWLIFFRFLMGTGMGALIMVGYASFTEFIPATVRGKWSARLSFVGNWSPMLSAAIGVVVIAFFSWRIMFLLGGIGILLAWFLSGKYFIESPRWLAGKGQIAGAESQLREVEQQIEREKSIRLPPLTLNQSNSKVKVIKGTFWLLFKGEMLRRTLVAITVLIAMNISLYTITVWIPTIFVNSGIDVDKSILMTAVIMIGAPVGIFIAALIIDHFPRRLFGSALLIIIAVLGYIYSIQTTEWAILIYGLVMIFFLYMYVCFASAVYIPELWPTHLRLRGSGFVNAVGRIVAVFTPYGVAALLTHYGSITVFMVLGVMLVLCALVLSIFGIETRKVSLEEISEVN

SEQ ID NO: 23870 - protein, 469 aa, Streptomyces avermitilis MA-4680
MSQTTTAVSGVSAPVSIGVRLDRMPITPMHRRLTAVIGIGLLFDTFENSLSGTIAKVLQGDFAFGATSLKLVLASVFVGQFIGSLVLGRVADRFGRRRAFLINLAIYSGFSLLGAFSPNAGWLIATRFLAGIGIGAEQALSDCYLADVLPAAKRGRFIAWAYTLAFCGVPAVGFAALWLVPLTPLGVDGWRWLFVIGALGSAVVWVLRRQLIESPRWLAATGRTAEADRLVSRMEAQAPAGRTAEDLPAPYEAPGAARVRLRDVFAPGLRRRTVMLWIFCALSVVGYYGFGTLAPQILAAKGFDIVAGLGFTALCFLGYPVGSALSLPVIDRVERKTLVAASAAAMVAAGMGFAFTDSPALIVAFGFGYTLCSNVFSSVSHVYLSEQYPTAIRATASGAAYSLSKLSAAALPFVLLPVLDSYGPGALFAVIAAAMAALAVTVLTLGERTTGASVDRAPVPVNIPTLKRS

SEQ ID NO: 23871 - protein, 482 aa, Arabidopsis thaliana
MAIREIKDVERGEIVNKVEDLGKPFLTHEDDEKESENNESYLMVLFSTFVAVCGSFEFGSCVGYSAPTQSSIRQDLNLSLAEFSMFGSILTIGAMLGAVMSGKISDFSGRKGAMRTSACFCITGWLAVFFTKGALLLDVGRFFTGYGIGVFSYVVPVYIAEISPKNLRGGLTTLNQLMIVIGSSVSFLIGSLISWKTLALTGLAPCIVLLFGLCFIPESPRWLAKAGHEKEFRVALQKLRGKDADITNEADGIQVSIQALEILPKARIQDLVSKKYGRSVIIGVSLMVFQQFVGINGIGFYASETFVKAGFTSGKLGTIAIACVQVPITVLGTILIDKSGRRPLIMISAGGIFLGCILTGTSFLLKGQSLLLEWVPSLAVGGVLIYVAAFSIGMGPVPWVIMSEIFPINVKGIAGSLVVLVNWSGAWAVSYTFNFLMSWSSPGTFYLYSAFAAATIIFVAKMVPETKGKTLEEIQACIRRET

SEQ ID NO: 23872 - protein, 482 aa, Arabidopsis thaliana
MAIREIKDVERGEIVNKVEDLGKPFLTHEDDEKESENNESYLMVLFSTFVAVCGSFEFGSCVGYSAPTQSSIRQDLNLSLAEFSMFGSILTIGAMLGAVMSGKISDFSGRKGAMRTSACFCITGWLAVFFTKGALLLDVGRFFTGYGIGVFSYVVPVYIAEISPKNLRGGLTTLNQLMIVIGSSVSFLIGSLISWKTLALTVLAPCIVLLFGLCFIPESPRWLAKAGHEKEFRVALQKLRGKDADITNEADGIQVSIQALEILPKARIQDLVSKKYGRSVIIGVSLMVFQQFVGINGIGFYASETFVKAGFTSGKLGTIAIACVQVPITVLGTILIDKSGRRPLIMISAGGIFLGCILTGTSFLLKGQSLLLEWVPSLAVGGVLIYVAAFSIGMGPVPWVIMSEIFPINVKGIAGSLVVLVNWSGAWAVSYTFNFLMSWSSPGTFYLYSAFAAATIIFVAKMVPETKGKTLEEIQACIRRET

SEQ ID NO: 23873 - protein, 501 aa, Oryza sativa (japonica cultivar-group)
MSFRGEESGGEDGGRTASASDLRKPFLHTGSWYKMSSAGGGGGMGSRLGSSAYSLRDSSVSAVLCTLIVALGPIQFGFTCGFSSPTQDAIISDLGLTLSEFSLFGSLSNVGAMVGAIASGQIAEYIGRKGSLMIAAIPNIIGWLAISFAKDSSFLFMGRLLEGFGVGVISYVVPVYIAEIAPQTMRGALGSVNQLSVTIGILLAYLLGMFVPWRILSVLGILPCSILIPGLFFIPESPRWLAKMGKMEDFESSLQVLRGFETDIAVEVNEIKRSVQSSRRRTTIRFADIKQKRYSVPLMVGIGLLVLQQLSGVNGILFYAASIFKAAGLTNSNLATFGLGVVQVVATGVTTWLTDKAGRRLLLIISTTGMTITLVVVSVSFFVKDNITNGSHLYSVMSMLSLVGLVAFVISFSLGLGAIPWIIMSEILPVNIKSLAGSVATLANWLTAWLITMTASLMLSWSNGGTFAIYAAVCAGTLVFVCLWVPETKGRTLEEIAFSFR

SEQ ID NO: 23874 - protein, 447 aa, Oryza sativa
  unsure (1)..(447): unsure at all Xaa locations
RXGEKEGEEHRSMSMLMLSTAVAVCGSFEFGTCVGYSAPTQSGIVDEVGLSISQFALFGSVLTIGAMIGAVTSGRLADFLGRKMTMRISATICIFGWLSLHLAKGVIMLYFGRILLGFSTGILSYVVPVFIAEIAPKNLRGGLATSNQLLICSGSSATYIIGALVAWRNLVLVGIVPCVLLLTGLLFIPESPRWLANVGREKEFHASLQMLRGEDADVSEEAVEIKVYIESLHRFPKARVQDLFLRKNIYAVTVGVGLMIFQQLGGINGVGFYASSIFTSAGTFSGKLGTILIGIIQIPITLFGAILMDKSGRRVLLMVSASGTFLGCFLTGISFYLKAQGLFSEWVPELALTGILVYIGAYSIGMGPVPWVVMSEAIGGSLVTLVSWLGSFAISYSFSFLMDWSSAGTFFMFSAASLITILFVVMVVPETKGRTLEEIQDSLIDSR

SEQ ID NO: 23875 - protein, 466 aa, Oryza sativa
  unsure (1)..(466): unsure at all Xaa locations
XPPPPNGKVNPVCTPCPLRKXKEKKTQXNGSLWMVFLATAVAVCGSFEFGTCVGYSAPAQAGIVNDFGLSNSEYGVFGSVLTIGAMIGALTSGRLADSLGRKTTMGLAAIIGIVGWFTIYFANGATMLYLGRVLLGYCTGVLSYVVPVFISEIAPKDLRGGLASSNQLFICSGCSAAYIIGALLSWRSLVLVGLVPCAFLLVGLLFIPESPRWLANTGRVKEFNASLQKLRGENADISEEAAGIREYIESLRSLPEARVQDLFQRKNLFAVIVGVGLMVFQQLGGINALGFYTSYIFSSAGRFSGKLGTTLIGIFQIPLTLFGALLMDRSGRRALLLVSASGTFLGCFLTGLSFYFKAQGVYAQLVPTLALYGISVYYAAYSVGMGPVPWVIMSEAIAGSLVTLVSWIGSFAISYSFNFLMDWNSAGTFFLFSAASLVTVLFVARLVPETKGKALEEIQESFTXQL

SEQ ID NO: 23876 - protein, 398 aa, Oryza sativa
  unsure (1)..(398): unsure at all Xaa locations
PPPPQTVRXTLFLATAVAVCGSFEFGTCVGYSAPAQAGIVNDFGLSNSEYGVFGSVLTIGAMIGALTSGRLADSLGRKTTMGLAAIIGIVGWFTIYFANGATMLYLGRVLLGYCTGVLSYVVPVFISEIAPKDLRGGLASSNQLFICSGCSAAYIIGALLSWRSLVLVGLVPCAFLLVGLLFIPESPRWLEVLCLITWQANTGRVKEFNASLQKLRGENADISEEAAGIREYIESLRSLPEARVQDLFQRKNLFAVIVGVGLMVFQQLGGINALGFYTSYIFSSAGFSGKLGTTLIGIFQVYYAAYSVGMGPVPWVIMSEIFSIEIKAIAGSLVTLVSWIGSFAISYSFNFLMDWNSAGTFFLFSAASLVTVLFVARLVPETKGKALEEIQESFTXQL

SEQ ID NO: 23877 - protein, 324 aa, Triticum aestivum
  unsure (1)..(324): unsure at all Xaa locations
AEIAPQNMRGALGSVNQLSVTIGILLAYTLGMFVPWRILSVLGILPCSILIPGLFFIPESPRWLAKMGKMEDFESSLQVLRGFETDISAEVNEIKRSVASSRRRTTATLANWRHKSSSVPLMIGIXLLILQQLSGVKGIFFYAASIFKAAGLKKSNLATCGLGAVHVVATGITTWLTDKAGRRLLLIISATGMTISLLVVSVSFFVKDNIDEASHLHFVMSMLSLAGLVAFVLAFSLGMGAIPWIIMSEILPVNIKSLAGSTATLANWMTSWLITMTASLMLNWSNGGTFAIYAAVSMGTLLFVCLCVPETKGRTLEEIAFSFR

SEQ ID NO: 23878 - protein, 208 aa, Triticum aestivum
  unsure (1)..(208): unsure at all Xaa locations
MGKPRASGDVESRALASGSGGATAPLLHRNDRKEDAKTQGGSLSMVLFSTAVAVCGSFEFGTCVGYSAPTQLGIEHELGLSIAEFAIFGSVLTIGAMIGAVTSGRLADSLGRKMTMRIAATICIFGWLSIHFAKGATMLYFGRTLLGFCTGVLSYVVPVFIAEIAPKDLRGGLATXNQLLIVCGSSSTYIIGALVTWRNLVFVGIVPX

SEQ ID NO: 23879 - protein, 288 aa, Triticum aestivum
  unsure (1)..(288): unsure at all Xaa locations
XLLAVLGTLPCTLLIPGLFFIPESPRWLAKMNLMDDFETSLQVLRGFETDITAEMNDIKRAVESANKKATVRFQELNQKKYRTPLLIGTGLLVLQNLCGINGILFYASRIFRAAGFTNSDLATCALGAIQVLATGVTTSLLDKAGRRMLLIISTAGTTLSLLAVSVAFFLKDNLPHDSHSDYILSMVSLVALVAYIITFSFGMGAIPWLIMSEILPVGIKSFAGSFATLANMLTSFGVTMTANLLLSWSAGGTFASYMVVSAFALVFVILWVPETKGRTLEEIQWSFR

SEQ ID NO: 23880 - protein, 281 aa, Triticum aestivum
  unsure (1)..(281): unsure at all Xaa locations
MAAGASISPPSPTRRRRQSXRSRRRTPEAATPRSALLPPSVSSSGFASDVRRTHVXTSRRRRASRRLQKRTLLQPGPMSTEWEGVEAKNRNSSVSSIWVVVASTTVAVAGSFVFGISVGYSSPSQKGIMRDLHLSLAEYSVFGSILTIGAMLGAIVSGTIADRVGRRCAMAISDVFCILGYLLIAFSKNSVWLDLGRLSIGCGIGLLSYVVPVYISEITPKNLRGRFAAVNQFMICCGASLAYALGTCITWRTLAIXVGVTPCLLQLAGLLVIPESPRGLX

SEQ ID NO: 23881 - protein, 337 aa, Triticum aestivum
  unsure (1)..(337): unsure at all Xaa locations
AASLSPPPLYLPSARAAMNGKGGDGGSDHDDMDMRKPLLVNTGSWYKMGSSLTAGSSSMAIICESHVSALLCTLIVALGPIQFGFTGGFSSPTQDAITRDLGLSISEFSVFGSLSNIGAMVGAIASGQMVEHVGDKGALMIAAVPNILGLGSRSLAKDTTSLYTGRLCWYHIVHVTCITRRDYTSEISPRSRRGALXGCVNPLSVTLGMVLAYVLGMLVPWRMLALIGTLPCTILIPGLLFIPESPRWLAKMNKMDDFEASLQVLRGSETDITSEVNDIKTAVASANKMTAIRFQELNQKKFRMPLILGIGLLVLQQLSGINAILFYAGSIFKAAGX

SEQ ID NO: 23882 - protein, 488 aa, Saccharomyces cerevisiae
MAETERLMPNGGSRETKPLITGHLILGTIVACLGSIQYGYHIAELNAPQEFLSCSRFEAPDENISYDDTWVGQHGLKQCIALTDSQYGAITSIFSIGGLFGSYYAGNWANRYGRKYVSMGASAMCMVSSLLLFFSNSYLQLLFGRFLVGMSCGTAIVITPLFINEIAPVEWRGAMGSMNQVSINLGILLTQTLALKYADSYNWRWLLFSGSVIAVANILAWLKVDESPRWLVSHGFVSEAETALFKLRPGTYQQAKQEIQDWQRSHGHNRDPESSEETHSGPTLWQYVTDPSYKKPRTVILAILSCQQFCGINSIIFYGVKVIGKILPDYSIQVNFAISILNVVVTLAASAIIDHVGRRPLLLASTTVMTAMSLLISVGLTLSVSFLLVTATFVYIAAFAIGLGPIPFLIIGELSYPQDAATAQSFGTVCNWLATFIVGYLFPIGHGLMGGYVFAIFAAIAAMFATYVYKRVPETKGKTTYSEVWAGY

SEQ ID NO: 23883 - protein, 446 aa, Desulfitobacterium hafniense
MGKISISDVVDQIGVSKYTYKTYFLVGLTLIFCGFSYMIVSYTMPQMSAEWGLTKVQTGSLASWSLLGLMVGGMIAGIISDSIGRKKGLAIFTIWFSLLTFPIYFVNSFEAFAILRILGGVGFGACIPIAITLMAENVPTKNRGFFISSIMSFYVLGWVVAGVVAIYVVPTFGWRVCYLIGVLPVLYAFVLMAALQESPHWLLGKGREKEAIEVLKRIEMVSKGKANDYAPGSLFLPPRPKKVGVGALFSREYSRATMALWIIYFMGSVVIYGINGWLPTLLVDKGYGLVKGYSFAVLQNVFGAIGGLCTGYVADIIGRRTNVIIGWIATAVAILLLGVASNQWMVVICGMLVGLAMNWGLSGTQPLLAEGYPTEFRSTGVASAQAFGRVGGFLGPIVAGYVQQLGVGFTGTFVFFAVPAVIASFVALFFVVETKGKSIERISANA

SEQ ID NO: 23884 - protein, 516 aa, Caenorhabditis elegans
MNAVVASQNKNDRSFSNMESESSSNVEKSEKENHHQSLPDENWTPFLFFCISSIALASFQDGFQIGCINAPGPLIIDWIKKCHFELFGEVLSQYQADFIWSVAVSMFSVGGMFGSFCSGFLADKFGRKSTLLYNNILALLAAVCLSTSKLFNFYPMIVFGRFLVGLNCGITSGLVPMFLTELAPANLRGKCGSFHQLNISVAIVLSQALGLPQIFGTQVGWPYIFACVAIPTFLQLATIPFCVESPKYLISKLNDREEARRILEKLRGHTKVDEELEHMVQETMVTVEPLHQPGYVSLFKGDNQWPMIVSILMMFSQQFSGISAVTFYSTLIFKRNGLSGNEPMYATVGFGCIKLIATFGCLFLIDHPKFGRKRLHIAGLSGMCISSILIVITLTLSNAGYHWASYMNVLFILSFVVTFAFGPGPIPWFFTSELFDSATRGRAAAVSATSNWVANWMVGLTFLPINNIIHQYAFLMFTFFTFTFAIFTWKFVPETKGKSPSAIRKELAFMRKRICS

SEQ ID NO: 23885 - protein, 576 aa, Caenorhabditis elegans
MNAVVASQNKNDRSFSNMESESSSNVEKSEKENHHQSLPDENWTPFLFFCISSIALASFQDGFQIGCINAPGPLIIDWIKKCHFELFGEVLSQYQADFIWSVAVSMFSVGGMFGSFCSGFLADKFGRKSTLLYNNILALLAAVCLSTSKLFNFYPMIVFGRFLVGLNCGITSGLVPMFLTELAPANLRGKCGSFHQLNISVAIVLSQALGLPQIFGTQVGWPYIFACVAIPTFLQLATIPFCVESPKYLISKLNDREEARRILEKLRGHTKVDEELEHMVQETMVTVEPLHQPGYVSLFKGDNQWPMIVSILMMFSQQFSGISAVTFYSTLIFKRNGLSGNEPMYATVGFGCIKLIATFGCLFLIDHPKFGRKRLHIAGLSGMCISSILIVITLTLSNAGYHWASYMNVLFILSFVVTFAFGPGPIPWFFTSELFDSATRGRAAAVSATSNWVANWMVGLTFLPINNIIHQYAFLMFTFFTFTFAIFTWKFVPETKGKSPSAIRKDLQNASFDYSSPSRPSRTFFSPIWIWVQLWLRSTNVSWIWWIWWRTSRASYWKEVGRREELFADFLYLIVI

SEQ ID NO: 23886 - protein, 465 aa, Drosophila melanogaster
MSKGSVLPQYIAGLSASFGALCMGASIGWSSPVENMITVNTEYGFPISSSQFGWVSSLLTLGATVICIPIGFAIDWIGRRPTMLALIPPYMVGWVLMLFAKNVTMLYFGRFILGMCGGAFCVTAPMYCTEITATALRGTIGSFFQLLIVSGVLYGYLVGAFLPLLTINILCAILPVIFAIIHFFMPESPVYLAMKGRNDDAAKALQWLRGKDADIDDELKEILEESQKQIDMPQVNILSSLRRPIVLKGLGIAVLLQVFQQWTGINAVLFYSASIFEDTGSDISGSDATLIIGVTQVTSTLVAVAIIDKAGRRILLLISGVLMAVSTALMGVYFQLKENDPASMDNFGWLPISSICIFIIFFSIGFGPVPWLVMAELFSEDVKSVAGSIAGTSNWLSAFVVTLLFPILKSSIGPGPTFWIFTAIAVIAFFYSLFFVPETKGKTIIEIQDLLSGGKGVKSDDKSQT

SEQ ID NO: 23887 - protein, 489 aa, Drosophila melanogaster
MKILMRADTHVSFSVPVEEPKAICTFSQVLAALSVSLGSLVVGFVSAYTSPALVSMTDRNITSFEVTQDAGSWVGGIMPLAGLAGGIAGGPLIEYLGRRNTILATAVPFIVSSLLIACAVNVAMVLCGRFLAGFCVGIASLSLPVYLGETVQPEVRGTLGLLPTAFGNIGILLCFVAGSFMNWSMLAFLGAALPVPFLILMFLIPETPRWFVGRGLEERARKALKWLRGKEADVEPELKGLMRSQADADRQASRNTMLELLKLNNLKPLSISLGLMFFQQFSGINAVIFYTVQIFKDAGSTIDGNLCTIIVGIVNFLATFIGIVLIDRAGRKILLYVSDIAMVLTLFVLGGFFYCKTYGPDVSHLGWLPLTCFVIYILGFSLGFGPIPWLMMGEILPAKIRGSAASVATAFNWFCTFVVTKTFQDLTVAMGAHGAFWLFGAICFVGLFFVIIYVPETQGKTLEDIERKMMGRVRRMSSVANIKPLSFNM

SEQ ID NO: 23888 - protein, 857 aa, Drosophila melanogaster
MSGRDNRGAGGGGGGHQPLSNAMGKLKEKLTRVGDELGYHRVESNLSTSNTATSLDTILPEDPFLFPQVSPQRHPQNTVRTQRLLEDEPPLSFRPLLEDDDINEPPTQQQQRTPLRASGSLELTPLPPPPTSLEIREHRDRQQRGAQGDELQRSKQSLKGSRVSFERRDTGNSNTNSNKAAESSDEDSFEEKRTGFQQQKATSVDHKGILKDLKHILANDNRRQFQAKKHVSLDVKGTRFLQDLLKESSSEEEFHKTRREFQGRKHQSLDPRVTFKLDKVLQGSSTDSDEEGEDAEHKRLIHRPKDITKPVIIDLKDLESESDEDFLTSRQHFQQQRSISTDSRKSRRLYEMDEMDNKRGENIRHAVPFVRQITEDGKPKLEVYRPTTNPIYIWTQVLAALSVSLGSLVVGFVSAYTSPALVSMTDRNITSFEVTQDAGSWVGGIMPLAGLAGGIAGGPLIEYLGRRNTILATAVPFIVSSLLIACAVNVAMVLCGRFLAGFCVGIASLSLPVYLGETVQPEVRGTLGLLPTAFGNIGILLCFVAGSFMNWSMLAFLGAALPVPFLILMFLIPETPRWFVGRGLEERARKALKWLRGKEADVEPELKGLMRSQADADRQASRNTMLELLKLNNLKPLSISLGLMFFQQFSGINAVIFYTVQIFKDAGSTIDGNLCTIIVGIVNFLATFIGIVLIDRAGRKILLYVSDIAMVLTLFVLGGFFYCKTYGPDVSHLGWLPLTCFVIYILGFSLGFGPIPWLMMGEILPAKIRGSAASVATAFNWFCTFVVTKTFQDLTVAMGAHGAFWLFGAICFVGLFFVIIYVPETQGKTLEDIERKMMGRVRRMSSVANIKPLSFNM

SEQ ID NO: 23889 - protein, 506 aa, Drosophila melanogaster
MDEMDNKRGENIRHAVPFVRQITEDGKPKLEVYRPTTNPIYIWTQVLAALSVSLGSLVVGFVSAYTSPALVSMTDRNITSFEVTQDAGSWVGGIMPLAGLAGGIAGGPLIEYLGRRNTILATAVPFIVSSLLIACAVNVAMVLCGRFLAGFCVGIASLSLPVYLGETVQPEVRGTLGLLPTAFGNIGILLCFVAGSFMNWSMLAFLGAALPVPFLILMFLIPETPRWFVGRGLEERARKALKWLRGKEADVEPELKGLMRSQADADRQASRNTMLELLKLNNLKPLSISLGLMFFQQFSGINAVIFYTVQIFKDAGSTIDGNLCTVIVGIVNFLATFIGIVLIDRAGRKILLYVSDIAMVLTLFVLGGFFYCKTYGPDVSHLGWLPLTCFVIYILGFSLGFGPIPWLMMGEILPAKIRGSAASVATAFNWFCTFVVTKTFQDLTVAMGAHGAFWLFGAICFVGLFFVIIYVPETQGKTLEDIERKMMGRVRRMSSVANIKPLSFNM

SEQ ID NO: 23890 - protein, 444 aa, Drosophila melanogaster
MGTATQFIVGFIGALGAFCLGAVIGWSGPVENEVKNSNAYNFTPRQTEWGLVGSLMTLGAAFSCIPVGVLIGKIGRKTTMLILLPPFFIGWLLILLASHIAMLLLGRFVVGFCGGAFCVTCPMYVTEIAQVQYRGTMGCFFQLLIVFGILYAFVVGGFVKTFYFNIACAILPVIFFVLMIFMPESPIFLAQKGKAEKAEKSLKFLRGKDADVSGELKEMSAEGQKEKASVGKILCRRITLKGLFLSIGLMLFQQMTGINAIIFYSTFIFETAGSTLEPRISTIIVGIVQAIATIISILVIEKVGRKILLLVSACMMGISTLIMALYFGMLMKSGVGWLALIAVCVFIIGFSLGFGPVPWLMMAELFAEDVKALAGSIAGTTNWCFAFIVTLLFPVLNDIIGATACFAIFFGFAVAAFVFILFLIPETKGKTLNEIQAKMGEKAE

SEQ ID NO: 23891 - protein, 471 aa, Drosophila melanogaster
MVHTSTSNNSQKWPQYVAALAAAGGAFAAGTVLGWTSPAETEIVDRGEGYDFPVDKDQFSWVGSAMTLGAACVCIPIGFLINMIGRKWTMLFLVLPFILGWTMLIWAVNVSMLYASRFILGIAGGAFCVTAPMYTGEIAQKEIRGTLGSFFQLMITIGILFVYAVGAGVKIFWLSIICGILPLIFGAIFFFMPESPTYLVSKDRSENAIKSIQWLRGKEYDYEPELAELRETDRETKANKVNVWAALNRPVTRKALAISMGLMFFQQVCGINAVIFYASRIFLEANTGIEAEWATILIGIMQVVATFVSTLVVDKLGRRILLLASGISMAISTTAIGVYFFLQKQDAAQVVSLGWLPVASLCLFIIMFSIGYGPVPWLMMGELFATDIKGFAGSLAGTSNWLLAFVVTKTFVNLNDGLGIGGTFWLFAGLTVVGVIFVYFAVPETKGKSLNEIQQELAGNRSTPQAIPAEK

SEQ ID NO: 23892 - protein, 539 aa, Drosophila melanogaster
MSTASSSNSSGEEANKKSGSNNEESSHLLESAENGAKYGSRQPVKIVKASDNGRTSSTPHDQENLLGNMVHTSTSNNSQKWPQYVAALAAAGGAFAAGTVLGWTSPAETEIVDRGEGYDFPVDKDQFSWVGSAMTLGAACVCIPIGFLINMIGRKWTMLFLVLPFILGWTMLIWAVNVSMLYASRFILGIAGGAFCVTAPMYTGEIAQKEIRGTLGSFFQLMITIGILFVYAVGAGVKIFWLSIICGILPLIFGAIFFFMPESPTYLVSKDRSENAIKSIQWLRGKEYDYEPELAELRETDRETKANKVNVWAALNRPVTRKALAISMGLMFFQQVCGINAVIFYASRIFLEANTGIEAEWATILIGIMQVVATFVSTLVVDKLGRRILLLASGISMAISTTAIGVYFFLQKQDAAQVVSLGWLPVASLCLFIIMFSIGYGPVPWLMMGELFATDIKGFAGSLAGTSNWLLAFVVTKTFVNLNDGLGIGGTFWLFAGLTVVGVIFVYFAVPETKGKSLNEIQQELAGNRSTPQAIPAEK

SEQ ID NO: 23893 - protein, 496 aa, Drosophila melanogaster
MVATEELKTTVSQEDGDSRNPITYDLLQENQSKTSKTRQYVAAMIICLGAVAAGTALSWTSPVFPQISAGNESSFNSTTGGISNSTSNENDIRLTDSQKTLVGSMLPFGALFGALPSGYIADRIGRRYTAMVMDIPFILAWITLSFANSVGWLYLGRFLIGIATGSFCVVAPMYISEIAETSIRGSLGTLFQLLLTIGILFIYVVGALVSWKTLSLLCLIIPILLLVGLFIVPETPVYLLKNGKRSEANRALKWLWGDYCNTSNAIQAIQNDLDQTGVDASVKDLFSNRASRNGMVISVLLMVFQQFSGINAVIFFMNEIFESSSTLNPNVCTIVVGVVQVIMTLASSLLIEKAGRKILLIFSSTIMTVCLAMLGAYNTINRHTDLSQSIGWLPLLCIVLFIVSFSVGYGPIPWMMMGELFMPDVKGIAVSLSVMMNWVCVSLVTWLFGVLNAGGADVPFWFFSAWMGVATAYVAIALQETKGKSASQIQSWLSGR

SEQ ID NO: 23894 - protein, 724 aa, Discopyge ommata
MDDAYRNRTTLMKGAKDIAKEVKKQTIKKGTVGAEYTQDRYSKTAYANFQDDDCYNYSRGTYGEEQQEDEGSSDATEGHDEEDEIYEGEYQGIPDMSQKKESQVAIGQLVSDEYKDREELDAERRADEEELAQQYELIIQECGHGRFQWALFLVLGLSLMADGVEVFVVGFVLPSAETDMCVENSNSGWLGSIVYLGMMLGAFFWGGLADKMGRRQTLIICMSINGFFAFLSSFVQGYSLFLFCRFFAGFGIGGAVPVVFAYFAEVLAREKRGEHLSWLCMFWMIGGIYASAMAWAIIPHYGWSFSMGSAYQFHSWRVFVVVCALPCMSSVVALTFMPESPRYLLEVGKHDEAWMILKQIHDTNMRARGQPEKVFTVNRIKTPKLIDELIEIQTDTGTWYMRWFVRIKTEMYGIWLTFMRCLDYPVKRNTILLIIVWTTLSFGYYGLSVWFPDVIKHLQADEYASRVKRFYGEKVEDFVFNFTLENQIHTNGEYIRDRFTIMKFKAVTFEDSLFKNCYFEDITSLSTYFKNCTFTETLFYNTDLEEFKFIDCQFINSTFLHNKKGCQINFDEDYSAYWIYFVNFLGTLAVLPGNIVSALLMDRIGRLTMLGGSMVLSGISCFFLWFGTSEAMMIGMLCLYNGLTISAWNSLDVITVELLPTDRRATGFGFLNALCKAATVLGNLIFGSLVGITKSIPIMLASTVLVCGGLVGLRLPDTRNQVLM

SEQ ID NO: 23895 - protein, 452 aa, Escherichia coli K12
MEQYDQIGARLDRLPLARFHYRIFGIISFSLLLTGFLSYSGNVVLAKLVSNGWSNNFLNAAFTSALMFGYFIGSLTGGFIGDYFGRRRAFRINLLIVGIAATGAAFVPDMYWLIFFRFLMGTGMGALIMVGYASFTEFIPATVRGKWSARLSFVGNWSPMLSAAIGVVVIAFFSWRIMFLLGGIGILLAWFLSGKYFIESPRWLAGKGQIAGAECQLREVEQQIEREKSIRLPPLTSYQSNSKVKVIKGTFWLLFKGEMLRRTLVAITVLIAMNISLYTITVWIPTIFVNSGIDVDKSILMTAVIMIGAPVGIFIAALIIDHFPRRLFGSTLLIIIAVLGYIYSIQTTEWAILIYGLVMIFFLYMYVCFASAVYIPELWPTHLRLRGSGFVNAVGRIVAVFTPYGVAALLTHYGSITVFMVLGVMLLLCALVLSIFGIETRKVSLEEISEVN

SEQ ID NO: 23896 - protein, 507 aa, Homo sapiens
MQEPLLGAEGPDYDTFPEKPPPSPGDRARVGTLQNKRVFLATFAAVLGNFSFGYALVYTSPVIPALERSLDPDLHLTKSQASWFGSVFTLGAAAGGLSAMILNDLLGRKLSIMFSAVPSAAGYALMAGAHGLWMLLLGRTLTGFAGGLTAACIPVYVSEIAPPGVRGALGATPQLMAVFGSLSLYALGLLLPWRWLAVAGEAPVLIMILLLSFMPNSPRFLLSRGRDEEALRALAWLRGTDVDVHWEFEQIQDNVRRQSSRVSWAEARAPHVCRPITVALLMRLLQQLTGITPILVYLQSIFDSTAVLLPPKDDAAIVGAVRLLSVLIAALTMDLAGRKVLLFVSAAIMFAANLTLGLYIHFGPRPLSPNSTAGLESESWGDLAQPLAAPAGYLTLVPLLATMLFIMGYAVGWGPITWLLMSEVLPLRARGVASGLCVLASWLTAFVLTKSFLPVVSTFGLQVPFFFFAAICLVSLVFTGCCVPETKGRSLEQIESFFRTGRRSFLR

SEQ ID NO: 23897 - protein, 507 aa, Homo sapiens
MQEPLLGAEGPDYDTFPEKPPPSPGDRARVGTLQNKRVFLATFAAVLGNFSFGYALVYTSPVIPALERSLDPDLHLTKSQASWFGSVFTLGAAAGGLSAMILNDLLGRKLSIMFSAVPSAAGYALMAGAHGLWMLLLGRTLTGFAGGLTAACIPVYVSEIAPPGVRGALGATPQLMAVFGSLSLYALGLLLPWRWLAVAGEAPVLIMILLLSFMPNSPRFLLSRGRDEEALRALAWLRGTDVDVHWEFEQIQDNVRRQSSRVSWAEARAPHVCRPITVALLMRLLQQLTGITPILVYLQSIFDSTAVLLPPKDDAAIVGAVRLLSVLIAALTMDLAGRKVLLFVSAAIMFAANLTLGLYIHFGPRPLSPNSTAGLESESWGDLAQPLAAPAGYLTLVPLLATMLFIMGYAVGWGPITWLLMSEVLPLRARGVASGLCVLASWLTAFVLTKSFLPVVSTFGLQVPFFFFAAICLVSLVFTGCCVPETKGRSLEQIESFFRMGRRSFLR

SEQ ID NO: 23898 - protein, 445 aa, Homo sapiens
MQEPLLGAEGPDYDTFPEKPPPSPGDRARVGTLQNKRVFLATFAAVLGNFSFGYALVYTSPVIPALERSLDPDLHLTKSQASWFGSVFTLGAAAGGLSAMILNDLLGRKLSIMFSAVPSAAGYALMAGAHGLWMLLLGRTLTGFAGGLTAACIPVYVSEIAPPGVRGALGATPQLMAVFGSLSLYALGLLLPWRWLAVAGEAPVLIMILLLSFMPNSPRFLLSRGRDEEALRALAWLRGTDVDVHWEFEQIQDNVRRQSSRVSWAEARAPHVCRPITVALLMRLLQQLTGITPILVYLQSIFDSTAVLLPPKDDAAIVGAVRLLSVLIAALTMDLAGRKVLLFVSGYAVGWGPITWLLMSEVLPLRARGVASGLCVLASWLTAFVLTKSFLPVVSTFGLQVPFFFFAAICLVSLVFTGCCVPETKGRSLEQIESFFRTGRRSFLR

SEQ ID NO: 23899 - protein, 524 aa, Homo sapiens
MTEDKVTGTLVFTVITAVLGSFQFGYDIGVINAPQQVIISHYRHVLGVPLDDRKAINNYVINSTDELPTISYSMNPKPTPWAEEETVAAAQLITMLWSLSVSSFAVGGMTASFFGGWLGDTLGRIKAMLVANILSLVGALLMGFSKLGPSHILIIAGRSISGLYCGLISGLVPMYIGEIAPTALRGALGTFHQLAIVTGILISQIIGLEFILGNYDLWHILLGLSGVRAILQSLLLFFCPESPRYLYIKLDEEVKAKQSLKRLRGYDDVTKDINEMRKEREEASSEQKVSIIQLFTNSSYRQPILVALMLHVAQQFSGINGIFYYSTSIFQTAGISKPVYATIGVGAVNMVFTAVSVFLVEKAGRRSLFLIGMSGMFVCAIFMSVGLVLLNKFSWMSYVSMIAIFLFVSFFEIGPGPIPWFMVAEFFSQGPRPAALAIAAFSNWTCNFIVALCFQYIADFCGPYVFFLFAGVLLAFTLFTFFKVPETKGKSFEEIAAEFQKKSGSAHRPKAAVEMKFLGATETV

SEQ ID NO: 23900 - protein, 334 aa, Bos taurus
ISEIAYPEVRGLLGSCVQLMVVTGILLAYLAGWVLEWRWLAVLGCVAPSFMLLLMCFMPETPRFLLSQHKHQEAMAAMQFLWGYAQGWEEPPLGAQHQDFHVAQLRRPGVYKPFIIGISLMAFQQLSGVNAVMFYAETIFEEAKFKDSSLASVVVGVIQVLFTATAALIMDRAGRRLLLTLSGVVMVFSTSAFGTYFKLTEGGPSNSSHVDLPALVSMEAADTNVGLAWLAVGNMCLFIAGFAVGWGPIPWLLMSEIFPLHVKGVATGVCVLTNWFMAFLVTKEFSSLMEVLRPYGAFWLASAFCIFGVLFTLACVPETKGKTLEQITAHFEGR

SEQ ID NO: 23901 - protein, 530 aa, Mus musculus
MSGSNGPTDTHTYQSLAEDCLFGSVEQPKRSTGRLVMHSMAMFGREFCYAVEAAYVTPGLLSVGLPKSLYSMVWLLSPILGFLLQPVVGSASDHCRARWGRRRPYILTLAIMMLLGMALYLNGDAVVSALVANPRQKLIWAISITMVGVVLFDFSADFIDGPIKAYLFDVCSHQDKEKGLHYHALFTGFGGALGYILGAIDWVHLDLGRLLGTEFQVMFFFSALVLILCFITHLCSIPEAPLRDAATDPPSQQDPQGSSLSASGMHEYGSIEKVKNGGADTEQPVQEWKNQKPSGQSQRTMSMKSLLRALVNMPSHYRCLCVSHLIGWTAFLSNMLFFTDFMGQIVYHGDPYGAHNSTEFLIYERGVEVGCWGLCINSVFSSVYSYFQKAMVSYIGLKGLYFMGYLLFGLGTGFIGLFPNVYSTLVLCSMFGVMSSTLYTVPFNLIAEYHREEEKEKGQEAPGGPDNQGRGQGVDCAALTCMVQLAQILVGGGLGFLVNMAGSVVVVVITASAVSLIGCCFVALFVRYVD

SEQ ID NO: 23902 - protein, 530 aa, Mus musculus
MSGSNGPTDTHTYQSLAEDCPFGSVEQPKRSTGRLVMHSMAMFGREFCYAVEAAYVTPVLLSVGLPKSLYSMVWLLSPILGFLLQPVVGSASDHCRARWGRRRPYILTLAIMMLLGMALYLNGDAVVSALVANPRQKLIWAISITMVGVVLFDFSADFIDGPIKAYLFDVCSHQDKEKGLHYHALFTGFGGALGYILGAIDWVHLDLGRLLGTEFQVMFFFSALVLILCFITHLCSIPEAPLRDAATDPPSQQDPQGSSLSASGMHEYGSIEKVKNGGADTEQPVQEWKNKKPSGQSQRTMSMKSLLRALVNMPSHYRCLCVSHLIGWTAFLSNMLFFTDFMGQIVYHGDPYGAHNSTEFLIYERGVEVGCWGLCINSVFSSVYSYFQKAMVSYIGLKGLYFMGYLLFGLGTGFIGLFPNVYSTLVLCSMFGVMSSTLYTVPFNLIAEYHREEEKEKGQEAPGGPDNQGRGKGVDCAALTCMVQLAQILVGGGLGFLVNMAGSVVVVVITASAVSLIGCCFVALFVRYVD

SEQ ID NO: 23903 - protein, 553 aa, Mus musculus
MIQRLWASRLLRHRKAQLLLVNLLTFGLEVCLAAGITYVPPLLLEVGVEEKFMTMVLGIGPVLGLVSVPLLGSASDQWRGRYGRRRPFIWALSLGVLLSLFLIPRAGWLAGLLYPDTRPLELALLILGVGLLDFCGQVCFTPLEALLSDLFRDPDHCRQAFSVYAFMISLGGCLGYLLPAIDWDTSVLAPYLGTQEECLFGLLTLIFLICMAATLFVTEEAVLGPPEPAEGLLVSAVSRRCCPCHVGLAFRNLGTLFPRLQQLCCRMPRTLRRLFVAELCSWMALMTFTLFYTDFVGEGLYQGVPRAEPGTEARRHYDEGIRMGSLGLFLQCAISLVFSLVMDRLVQKFGTRSVYLASVMTFPVAAAATCLSHSVVVVTASAALTGFTFSALQILPYTLASLYHREKQVFLPKYRGDAGGSSGEDSQTTSFLPGPKPGALFPNGHVGSGSSGILAPPPALCGASACDVSMRVVVGEPPEARVVTGRGICLDLAILDSAFLLSQVAPSLFMGSIVQLSHSVTAYMVSAAGLGLVAIYFATQVVFDKNDLAKYSV

SEQ ID NO: 23904 - protein, 450 aa, Mus musculus
PRAGWLAGLLYPDTRPLELALLILGVGLLDFCGQVCFTPLEALLSDLFRDPDHCRQAFSVYAFMISLGGCLGYLLPAIDWDTSVLAPYLGTQEECLFGLLTLIFLICMAATLFVTEEAVLGPPEPAEGLLVSAVSRRCCPCHVGLAFRNLGTLFPRLQQLCCRMPRTLRRLFVAELCSWMALMTFTLFYTDFVGEGLYQGVPRAEPGTEARRHYDEGIRMGSLGLFLQCAISLVFSLVMDRLVQKFGTRSVYLASVMTFPVAAAATCLSHSVVVVTASAALTGFTFSALQILPYTLASLYHREKQVFLPKYRGDAGGSSGEDSQTTSFLPGPKPGALFPNGHVGSGSSGILAPPPALCGASACDVSMRVVVGEPPEARVVTGRGICLDLAILDSAFLLSQVAPSLFMGSIVQLSHSVTAYMVSAAGLGLVAIYFATQVVFDKNDLAKYSV

SEQ ID NO: 23905 - protein, 553 aa, Rattus norvegicus
MIQRLWASRLLRHRKAQLLLVNLLTFGLEVCLAAGITYVPPLLLEVGVEEKFMTMVLGIGPVLGLVSVPLLGSASDQWRGRYGRRRPFIWALSLGVLLSLFLIPRAGWLAGLLCSDTRPLELALLILGVGLLDFCGQVCFTPLEALLSDLFRDPDHCRQAFSVYAFMISLGGCLGYLLPAIDWDTSALAPYLGTQEECLFGLLTLIFLICVAATLLVAEEAVLGPPEPAEGLLVSSVSRRCCSCHAGLAFRNLGTLFPRLHQLCCRMPRTLRRLFVAELCSWMALMTFTLFYTDFVGEGLYQGVPRAEPGTEARRHYDEGIRMGSLGLFLQCAISLFFSLVMDRLVQKFGTRSVYLASVMTFPVAAAATCLSHSVVVVTASAALTGFTFSALQILPYTLASLYHREKQVFLPKYRGDAGGGSSEDSQTTSFLLGPKPGAPFPNGHVGPGGSSILVPPPALCGASACDVSMRVVVGEPPEAKVVTGRGICLDLAILDSAFLLSQVAPSLFMGSIVQLSHSVTAYMVSAAGLGLVAIYFATQVVFDKNDLAKYSL

SEQ ID NO: 23906 - protein, 801 aa, Rattus norvegicus
MAPQNADSESMQVQELPVPLPDPQKPRDPAAETQEETTSEASIDRIPTRLWVMHGAVMFGREFCYAMETALVTPILLQIGLPEKYYSLTWFLSPVLGLIFTPLIGSASDRCTLSWGRRRPFILVLCVGVLIGVALFLNGSAIGLALGDVPSRQPIGIVLTVLGVVVLDFSADATEGPIRAYLLDVVDSEEQDMALNIHAFSAGKDPCQAPGLGGAIGYVLGGLDWTQTFLGDWFQTQNQVLFFFAAVFFSVSVALHLFSIEEEQYNPQQDRGPEDATLPSTDEVQSEHELSLDYLDVDIVRSKSDSVLHMADSTLDMEPQLLFLHDIEPSIFQDASYPSTPQSTSQELLRAKLPRLSTFLRESTKEDDTLLDNHLNEAKVPNGRGSPPMNPLSHSKVDLKPSVTSSSMRRRRHMFHRQSSSTFSYYGKIGSHCYRYRRANAVVLIKPSRSMSDLYDLQQRQRSRHRNQSGATASSGDTESEEGETETTVRLLWLSMLKMPKELMWLCLCHLLTWFSVIAEAVFYTDFMGQVIFKGNPQVSTLGLPVLLPREFGSFRAGPPVSLHALPLHPRGRVDQAPSNSTKWHAYNAGVKMGCWGLVIYAATGAICSALLQKYLDNYDLSIRIIYMLGTLGFSVGTAVMAMFPNVYVAMVTISTMGVVSMSISYCPYALLGHYHDIKEYVHHSPGNSKRGFGIDCAILSCQVYISQILVASALGGVVDTVNTIVVIPIVASVGSFLGFLTATFLVIYPEVSEEAKEEQKGLSSGAAGEGESGAGTEKPTVLKLSRKGGLRGLMETESMV

SEQ ID NO: 23907 - protein, 751 aa, Rattus norvegicus
MIPPAGSTPPGEALIPSVAPQDFWRSPISGYSGSVTRHISHRANNFKRHPKRRKYIRPSPPPPPNTPCPIELVDFEDLHPQRSFWELLFNGCILFGIEFSYAMETAYVTPVLLQMGLPDQLYSLVWFISPILGFLLQPLLGAWSDRCTSRFGRRRPFILVLAIGALLGLSLLLNGRDIGMALADTATNHKWGILLTVCGVVLMDFSADSADNPSHAYMMDVCGPVDQDRGLNIHALMAGLGGGFGYVVGGIHWDKTSFGRALGGQLRVIYIFTAITLSVTTVFTLVSIPERPLRPLGEKRTAMKSPSLPLPPSPPVLLEEGAGDTLPSTTATSLYASFSSPISPPSPLTPKYGSFISRDSSLTGINEFASSFGTSNIDSVLIDCFTAGHDNYLALPSSVPRQAISVSFPRAPDGFYCQERGLERREGPLTLGLDGDVLRVGSLDTSKPRASGILKRPQTLALPDVAGGNGPETSRRRNVTFSQQVANILLNGVKYESELTGSSEQSEQPLSLRRLCSTIYNMPRPVRNLCVNHFLGWLSFEGMLLFYTDFMGEVVFQGDPKAPHASEAYQKYNSGVTMGCWGMCIYAFSAAFYSAILEKLEECLSVRTLYFIAYLLFGLGTGLATLSRNLYVVLSLCTHYGILFSTLCTLPYSLLCDYYQSKKFAGSSADGTRRGMGVDISLLSCQYFLAQILVSLVLGPLTSAVGSANGVMYFASLVSFLGCLYSSLCVTYEIPSADAADEERQPLLLNV

SEQ ID NO: 23908 - protein, 619 aa, Rattus norvegicus
MSGSNGPTDTRAYQSLAEDCPFGSAEQPKRSTGRLVMHSMAMFGREFCYAVEAAYVTPVLLSVGLPKSLYSMVWLLSPILGFLLQPVVGSASDHCRARWGRRRPYILTLGVMMLLGMALYLNGDAAVSALVANPRQKLVWAISITMIGVVLFDFSADFIDGPIKAYLFDVCSHQDKEKGLHYHALFTGKVVSVPSASGQKNCFPSEEDGGNTLGLVSFYFRKEAQERYSPYVDLNYGLGTRPINEPEMHSSLILNQEKKPESGFMSPVRKRGVSHLGFGGALGYLLGAIDWMHLELGKLLGTEFQVMFFFSALVLTLCFITHLCSIPEDPLRDDATDPPLQPDPQGSSLSADGMPRYGSIEKVKNGDADTGLPVQGGKNKKPSGQSQRTMSMKSLLRALVNMPSHYRCLCISHLIGWTAFLSNMLFFTDFMGQIVYHGDPYGAHNSTEFLIYERGVEVGCWGLCINSVFSSVYSYFQKVMVSYIGLKGLYFMGYLLFGLGTGFIGLFPNVYSTLVLCSMFGVMSSTLYTVPFNLIAEYHREEEKEKQQEVPGGPDNHGRGKGVDCAALTCMVQLAQILVGGGLGFLVNMAGSVVVVVITASAVALIGCCFVALFVRYVD

SEQ ID NO: 23909 - protein, 265 aa, Viscum album subsp. album
IAAGVQFGWALQLSLLTPYVQELGIPHKWASIIWLCGPLSGLFVQPLVGVMSDRCTSRFGRRRPFIFAGSLLIAISVLIIGHSADIGWWLGDRGGVRPRAIGAFVFGFWILDVANNMTQGPCRALLADLTGKDHRRTRVANAYFSLFMAIGNILGFATGSYNGWYKVFPFTVTSACNIDCANLKSAFYLDVVFMAITACISISAAQESPLDLPARSMLADEEMLGQSNSVQEAFLWELFGTFRCFPSTVWIILLVTALNWIAWFP

SEQ ID NO: 23910 - protein, 502 aa, Alonsoa meridionalis
MEVGNEAKSTALPPAQAAPVKNIIVVAAIAAGVQFGWALQLSLLTPYVQLLGVPHVWAAFIWLCGPISGLLVQPIVGYYSDNCTSRFGRRRPFIAAGAGLVAVAVFLIGFAADLGHMGGDSLGKGTKPRAVAVFVVGFWILDVANNMLQGPCRALLADMSAGNAKKMSSANSMFSFFMAVGNVLGYAAGSYTRLYKVFPFSKTEACAVYCANLKSCFFISVALLLTVTIIALCIVRETPYTAPPEEAGTVKKHTVPVFGELFGALKDLPRPMWMLLLVTALNWVAWFPFLLFDTDWMGKEVYGGKVGEGSLYDKGVRVGALGLMLNSVVLGVASLGVQVTARGLGGVKRLWGSVNLLLAICLAMTVLITKMAQHHREYASVGGAAPTLQPPVHGVKIGALALFSVLGIPLAATFSIPFALASIYSSNSGAGQGLSLGVLNLAIVIPQMFVSVASGPWDALFGGGNLPAFVVGAVAATVSGIIALTALPSPPSDVKILATGGH

SEQ ID NO: 23911 - protein, 510 aa, Asarina barclaiana
MENGDHRTAPAFQLQQASPPEAAPVRNIILVAAIAAGVQFGWALQLSLLTPYVQLLGIPHTWTAFIWLCGPVSGMLVQPIVGYYSDNCTLRFGRRKPFIAGGAGLVVVAVFLIGFAADIGYAAGDTLGKGTKPRATAVFVVGFWILDVANNMLQGPCRALLADLSGGNARKMSNANALYSFFMAVGNVSGYAAGSYTHLFKIFPFSKTKACDVYCANLKSCFFISVALLLCVSALALTIVRETPPPETAEAPEATKKKKIPVFGELFSALKNLPRPMWFLLLVACLNWIAWFPFLLFDTDWMGKEVYGGTVAEGKMYDRGVRAGALGLMLNPVVLGFSSLGIQAIARGVGGPKRLWGGVNFLLAVCLALTVVITKQAEHSRLYTVGADGVQILLPPVPGVKISALALSGVLGIPLAVTFSIPFALASIYSSNYGAGQGLSLGVLNLAIVIPQMVVSVASGPLDALFGGGNIPAFVMGAVAAAVSGIFAVTMLPALPADASTKNLSVGSFH

SEQ ID NO: 23912 - protein, 506 aa, Hordeum vulgare subsp. vulgare
MPPRRPNTGGGGGTSSSAAPAPRKVPLRSLLRAASVACGVQFGWALQLSLLTPYVQELGIPHAFASLVWLCGPLSGLLVQPLVGHLSDRITPANSPLGRRRPFIAAGAASIAFAVLTVGFSADLGRLFGDNVVPGSTRIGAIIVYLVGFWLLDVGNNATQGPCRAFLADLTENDPRRTRIANAYFSLFMALGNILGYATGAYNGWYKIFPFTITGSCGVSCANLNSAFLLDIIILAITTYISVATVQDNPTFGSDEAAPPSSHEEEAFLFELFGSFKYFTMPVWMVLIVTSLTWVGWFLFILFDTDWMGREIYRGSPEIVADTQKYHDGVRMGSFGLMLNSVVLGITSIGMEKLCRKWGAGLVWGVSNIIMALCFVAMLIITYVAQNLDYGPSGAPPTGIVAASLIVFTILGAPLSITYSIPYAMAASRVENLGLGQGLAMGILNLSIVIPQIIVSLGSGPWDQLFGGGNAPSFWVAAAASFVGGLVAILGLPRARLGPKKKTTQR

SEQ ID NO: 23913 - protein, 523 aa, Hordeum vulgare subsp. vulgare
MARGGGNGEVELSVGVGGGGGGAAPRAAEPAVQISLGRLILAGMVAGGVQYGWALQLSLLTPYVQTLGLSHALTSFMWLCGPIAGLVVQPCVGLYSDKCTSRWGRRRPFILTGCVLICLAVIIVGFSADIGAALGDSKEECSLYHGPRWHAAIVYVLGFWLLDFSNNTVQGPARALMADLSAQHGPSAANSIFCSWMALGNILGYSSGSTNNWHKWFPFLRTRACCEACANLKGAFLVAVLFLSLALVITLIFAKEVPYKAIAPLPTKANGQVEVEPTGPLAVFKGFKNLPPGMPSVLLVTGLTWLSWFPFILYDTDWMGREIYHGDPKGTPAEANAFQEGVRAGAFGLLLNSVVLGFSSFLIEPMCKRLGPRVVWVSSNMLVCLSMAAICIISWWATQDLHGYIQHAITASKEIKAVSLALFAFLGIPLAILYSVPFAVTAQLAANKGGGQGLCTGVLNIAIVIPQVIIAVGAGPWDELFGKGNIPAFGMASVFALIGGVVGIFLLPKISRRQFRAVSGGGH

SEQ ID NO: 23914 - protein, 451 aa, Neisseria meningitidis MC58
MSEYTPQTAKQGLPALAKSTIWMLSFGFLGVQTAFTLQSSQMSRIFQTLGADPHNLGWFFILPPLAGMLVQPIVGHYSDRTWKPRLGGRRLPYLLYGTLIAVIVMILMPNSGSFGFGYASLAALSFGALMIALLDVSSNMAMQPFKMMVGDMVNEEQKGYAYGIQSFLANTGAVVAAILPFVFAYIGLANTAEKGVVPQTVVVAFYVGAALLVITSAFTIFKVKEYDPETYARYHGIDVAANQEKANWIELLKTAPKAFWTVTLVQFFCWFAFQYMWTYSAGAIAENVWHTTDASSVGYQEAGNWYGVLAAVQSVAAVICSFVLAKVPNKYHKAGYFGCLALGALGFFSVFFIGNQYALVLSYTLIGIAWAGIITYPLTIVTNALSGKHMGTYLGLFNGSICMPQIVASLLSFVLFPMLGGLQATMFLVGGVVLLLGAFSVFLIKETHGGV

SEQ ID NO: 23915 - protein, 451 aa, Neisseria meningitidis Z2491
MSEYTPQTAKQGLPALAKSTIWMLSFGFLGVQTAFTLQSSQMSRIFQTLGADPHSLGWFFILPPLAGMLVQPIVGHYSDRTWKPRLGGRRLPYLLYGTLIAVIVMILMPNSGSFGFGYASLAALSFGALMIALLDVSSNMAMQPFKMMVGDMVNEEQKGYAYGIQSFLANTGAVVAAILPFVFAYIGLANTAEKGVVPQTVVVAFYVGAALLVITSAFTIFKVKEYNPETYARYHGIDVAANQEKANWIELLKTAPKAFWTVTLVQFFCWFAFQYMWTYSAGAIAENVWHTTDASSVGYQEAGNWYGVLAAVQSVAAVICSFVLAKVPNKYHKAGYFGCLALGALGFFSVFFIGNQYALVLSYTLIGIAWAGIITYPLTIVTNALSGKHMGTYLGLFNGSICMPQIVASLLSFVLFPMLGGLQATMFLVGGVVLLLGAFSVFLIKETHGGV

SEQ ID NO: 23916 - protein, 453 aa, Lactobacillus gasseri
MMREKTMNENDKVAGLPELAKSVIWMINFGYLGIQIAFTLETSQMSRIFQTLGADPTKLGWFFILPPLAGLVVQPAIGSLSDKTWAPKLGGRRLPYLLIGMIFAVIMMLLLPNIGNFGLGYGSVEALVFGAIAIAILDVSANMAMQPFKMMIGDMVNDEQKSYAYGIQSMLSNSGAVIAAFFPFLLTILGVANTAKKGVVPQSVVISFYVGAAILVITSLLTVTKVHEYDPQTYARYHGINEEDNKKDGNWFVLLKKAPKVFWEVSLVQLFCWFSFQYLSTYATGAIAANVWKAFDPASVGYQLAGNWFGVLTAVQSIAAVIWSYILAKVPNDHHKLGYGISLLLGAVGYGSIFFIQSQNLLILSFILIGISWAAMNTYPLTLVSNALSGKHMGTYLGLFNCSICLPQIIASLLSFVLFPLLKCSMPAMMLTAGISGVLGAISVLFIKETYGN

SEQ ID NO: 23917 - protein, 539 aa, Beta vulgaris
MEGRNVKNGDTNNNKIVGSSLSIEKNPISPPEASSLKKLALVASIAAGVQFGWALQLSLLTPYVQLLGIPHTWAPYIWLCGPISGMIVQPTVGYYSDRCTSKFGRRSPFIAVGATLVGFAVSLIGFAADIGHATGDPNGNVPKPRAIAVFVVGFWILDVANNTLQGPCRALLADMAAGSQAKTRYANAFFSFFMALGNIGGYAAGSYSRLYTVFPFTHTKACDTYCANLKSCFFISITLLIVLTILALSVVRERPFTLDEIQEEENLKNNTGGCARLPFFGQLFGALKDLPKPMLILLLVTCLNWIAWFPFLLFDTDWMGKEVYGGTVGEGKAYDMGVHAGALGLMINSVVLGIMSLGIEKLARLVGGVKRLWGIVNLILAVCLAMTILVTKSAEHYRATHHVPGAIGPPLPPPGFKGGALAIFSVLGIPLAITFSIPFALASIFSASSGSGQGLSLGVLNLAIVVPQMFVSVTSGPWDALFGGGNLPAFVVGAVAATASAILSFTLLPSPHRKPKSEGQWVAIKNKEAVLIFNFLFFI

SEQ ID NO: 23918 - protein, 523 aa, Beta vulgaris
MEGRNVKNGDTNNNKIVGSSLSIEKNPISPPEASSLKKLALVASIAAGVQFGWALQLSLLTPYVQLLGIPHTWAPYIWLCGPISGMIVQPTVGYYSDRCTSKFGRRSPFIAVGATLVGFAVSLIGFAADIGHATGDPNGNVPKPRAIAVFVVGFWILDVANNTLQGPCRALLADMAAGSQAKTRYANAFFSFFMALGNIGGYAGSYGRLYTVFPFTHTKACDTYCANLKSCFFISITLLIVLTILALSVVRERPFTLDEIQEEENLKNNTGGCARLPFFGQLFGALKDLPKPMLILLLVTCLNWIAWFPFLLFDTDWMGKEVYGGTVGEGKAYDMGVHAGALGLMINSVVLGIMSLGIEKLARLVGGVKRLWGIVNLILAVCLAMTILVTKSAEHYRATHHVPGAIGPPLPPPGVKGGALAIFAVLGIPLAITFSIPFALASIFSASSGSGQGLSLGVLNLAIVVPQMFVSVTSGPWDALFGGGNLPAFVVGAVAATASAILSFTLLPPPPPEAKIGGSMGGH

SEQ ID NO: 23919 - protein, 458 aa, Staphylococcus epidermidis ATCC 12228
MGEIGMNDTDRTHKENKLEQDITLPYLKKAVIFSITFGFFGVNMAFALQSAMMGRIFQTLGANPNNLGWFFILPPLVGMIVQPLIGYYSDRTWTRFGRRMPYLLIAGPIGAIVLVLLPNAGSFGFGYASLMALSFGAVMTLLMDLTSNACMQPYKMIIGDMVNEKQRDMAWSWQQIFSNLGGIIATVLPFLLTMLGISNVAPKGEVPMTVKLAYYIAAAVLLIASIWTVISVREYEPKTYNYYHGINENNRNNKLNLLQLLKKAPKQFWQISVVQFFNWFALMYLWTYSTGAIAKNVWNVTDPSSAGYQAAGNWYGVLYCIQFLSSVIFGFVIARSKPSQRKFWYSFGLVFGGIGLISIFFIHNQWLLIFSFVLIGINNLTMNTQPFTLLTEAIDGENSGAYLGLFNTSICLPQIVASIVSFGLYPLLGSSMPAMLLLAGIMMLLGAVSVKFINAKFE

SEQ ID NO: 23920 - protein, 479 aa, Anopheles gambiae str. PEST
STKTRWELVRLSLLIVGIECTYATETAFVAPILLAIGLPHTLMTMMWAMPPIVGVLFVPVVASVSDRLRSSWGRRRPVLLLLGIAMLLGMMLLPHGRAIGEAIGLRSVAWVATITTLGLTTTDFSAEASNGLCRTYAMEVCTIRDQARVLSTMMLIGGLGGMLGYLFGAIDWIALPIGQYFESNEAAVFTANWIVLLIGLVSTLTSFAEIPLPVQEQDAMLRPVTHSMLQNEVKRMRGDEYATQTQLSESIGFRQFVRNTVQMPRSMKILCLTQFLSHMGYLPYCLYFTDFVGAEVFGGDVQAPEHSPAFVLYEEGLRFACWGMALFAGCASLYSLVIERLIDRVGARPVYVGGLMAHCVGMVAMGLLRHRAIVMLCCSLTGIMYTTIYSIPFLLISHYHSKNSFHMKDGKCVESTEPRGFGADVSMMSSVLCLAQLIVSLVMGVLIDAAGTTTVITYVAGGCTLLAALSAMAVLYMGL

SEQ ID NO: 23921 - protein, 504 aa, Anopheles gambiae str. PEST
KKSRLELIRLSSVIVGIEFLYAAETAFVTPILLGIGLSHTFMTMVWAFSPVLGFFFAPMIASFSDTIRVQWGRRRPVLLALGLAMMTGMWILPHGKTIGVFFGDPDVPVDQMEGFRWSIPVTIIGLVLTDFDAETSNGIARAYFMDMCAPDDQSRVLTTAMFIGGLGGTAGYVLGAIDWSQTNLDILGSNEATVFMFVFIVMGVGLLITLTSYREVPLPLLERDPLLRPINSNAFEAEKSRQLAVYSISKDVIPQPIKPDQDAAIGIGDDDDEKPLRLRDFVRNIVHMPKSLFILYSTQFFSQLGYLSYCLYFTDFVGSEVFGGDVAGAPGSPELALYEEGVRYGCWGMAVFAVCSAFYSAVIERLVKRFSARPVYMAGLLLFSLGMLLMGLVKEKFMIFIACPTVGIMYATMYSLPYLLISQYHSKNSFEVKDGKCVPNTTKRGFGADVSMMSCMLFLAQLIISLAIGSIIDAVETNVVVIFSASIFSLVAALTASQIVYMGL

SEQ ID NO: 23922 - protein, 438 aa, Anopheles gambiae str. PEST
LIRISAAVMGIEFSYAAETAFVSPTLLKIGVEHQHMTLVWCLSPLVGFFLTPVLGSLSDRCRSKFGRRRPFIMLLSLGVLLGLLLVPNGEDVGTVDPVVSTVIPPTVPEHRPRHPWGIFFTILGTVLLDFDADACQSPARAFLLDVTVPEDHARGLSTFTIMAGLGGFMGYSLGGIDWDSTSLGIVLGGHVRAVFSLITVIFIVCVLCTVTSFSEIPLWILEEELERQDPPVEGRSNRLASEEPATYGATRHDRRSQPEASPASASYDELPGENFTETSFSGDKPTVTLSMYLLSIVYMPHSLRMVCLTNLFCWMAHVCYSLYFTDFVGEAVFDGDPKALDGTEKYLLYEAGVRFGCWGMAMYSLSCACYSLIIERLIKRFRAKSVYVGGLLFYCLGMSLMALSKHRVGVIVFSWTAGVMYSTLFTMPYLLVAHYHSE

SEQ ID NO: 23923 - protein, 679 aa, Anopheles gambiae str. PEST
MYREIKSIYNWLASAAISGTQTLTDSRRPIIRALQCSRRQRSFSSSSSSRGGTADLTMVKTGPGGGPSAASGRVVLARRKSLAQKDPLVEELRKAREENARQQQYDYSHVFRYEGHWVGGGRIMQISEMIREPCKKKTLLDFVRLSFVIMGIEIVYSAETAFVTPILLGIGIEHQLMTIVWGISPLIGFIVSPFLGTFSDRCRSRFGRRRPLLVVLGIGLVLGCLLLPFGETIGHWLGDTGESEKPVINNTVTIGGNRNPYGSATASTAHYKWAIVVTILGTILLDFCADSSQAPSMAYLLDVSLPDDHGQACSTYSLLSGVGGCIGYLIGAIDWNGTMLGELLGGNINTVFILVTVIFVLCLAVTVGSFREIPLPLMERDELLQPLTERAVTEQRQRTTVEKGLRPMKDIADALLLELEGDDSEPSDRTALLSYSEKEPLMGDFLQEKPKSSAKEFLRITFRIPATLAVLCVTNLFCWMSHISYSLYFTDFVGEKVFGGDPMAHSDSDEYALYIEGVRYGCFGMAIYSIACSTYSCTIERLIRVFRARNVYSGGLLIDFVGMLLMAMFPSKVTVYVFSVTGGIVGALLFTMPYIILAKYHAKGLLDTCDETNSIQPRRGLASDISIIGSMLFVAQIILSLTMGPLVTLTGTTASVIYTASVCSLVASLCATQIQYLDL

SEQ ID NO: 23924 - protein, 605 aa, Anopheles gambiae str. PEST
MVAGAGGSNFHSEFRNDPVVKEMRQIREENARRQKHDYSHVFRISAVIMGMEFVYSAETAFVSPILLSIGIEHQLMTMVWGISPLIGFFLSPVIGSVSDRCRSRFGRRRPVLFALGVGLITGCILVPYGRNIGAWFGDLGEYVDDPANTINGAAALIDINGTVVSDALRSYNFYRIEEQIAEHRTDYRWAIVITIIGTILTDFNADNCMTPSRAFLLDVSLPEDHGRACSTFSILAGLGGSIGYAMGGINWDETSFGEFLGGSIKTVFTLVVIIFTICLTISLTSFREIPLPLLESDDLLRPLTEAAIKKEKARRQNQIFVVKDVSKALTAQLQSIQSPQDAVPQKINNALVDVERAPRGKDEVELVEEEDENVQMGPMDFIKSIVMMPKSIAVLCLTNLFCWMSHLSYALYFTDFVGEEVFKGNPAAPSNSDEYKLFLEGVRYACFGMAIYSISCSTCSFTIEKLIKVLRARTVYCGGLILDAIGMACMAFFPNKVTVYVLSATGGIVYALLFTMPFLLLGQYHAKGTFKVAKPGAEVTQERKRGLATDIAVVGGMIFVAQIIVALGMGSLISAFGTTSVVVFSASICSLIASICASQVVYMDL

SEQ ID NO: 23925 - protein, 439 aa, Xanthomonas campestris pv. campestris str. ATCC 33913
MSSTAPPLSFARILALNAGFFGVQYSFGLQQSNMSPIYNYLGADHASLPYLWLAGPITGLVLQPFVGALSDRSVTRWGRRMPYMVLGALVCSLCLLAMPFSTALWMAVCLLWVLDAANNVAMEPYRALVSDVLAPPQRPLGYLTQSAFTGLAQTLAYLTPPLLVWFGMSQDAANAHHIPYVTIAAFVIGAGFSAASILLTARSVREPVVPAAEIARMRKAGTGLGATLREIGSALRDMPPTMRQLAPVMLFQWYAIFSYWQYIVLSLSTTLFGTTEANSHGFREAGLVNGQIGGFYNFIAFLAAFAMVPVVRRVGPKYTHAACLLAAGVGMWVLPGIENRWLLLLPMIGIGLAWASMMGNPYLMLADSIPPERTGVYMGLFNLFIVLPMLIQIVTLPLYYEPLLHGDPRNVIRLAGALMLAAAVAMLCVRIRKPKAVAA

SEQ ID NO: 23926 - protein, 492 aa, Xanthomonas campestris pv. campestris str. ATCC 33913
MKAKPTLSFWQIWNMCFGFLGIQFGFALQNANASRIFQTLGAQVDDVPGLWIAAPLTGLIVQPIIGYLSDRTWTGWGRRRPYFMIGAVFTTLALLVMPNAPVLWIAAGTLWVLDASINISMEPFRALVGDQLPAEQRPSGYAMQSFFIGVGAIVASFLPWLLTRWGVDNTAPAGELPDSVRYAFYLGAAVLFLSISWTVLRTREYSPAELAAFEPAPAPAAAQLAATDQPSLQASVLWCLGGLLLAAAIAWQHGDRMLYVLAGLCIAYGVLLALARVLPRGGMLVAIMHDLRHMPQTMRRLAWVQFFSWFALFAMWIYTTAAVPQVHFGARDTVSAAYNDGANWVGVLFGAYNGFAALAATVIPLMVRAIGLRWSHLCNLWLGAAGLLSMLFIRDPYWLLLSMLGVGFAWASILSLPYALLSDSVPAAKMGVYMGIFNFFIVIPQLVAASALGFVLRVWLGGQPIYALAIGGLSLIVAGVCVVRVPSAQGGQ

SEQ ID NO: 23927 - protein, 439 aa, Xanthomonas axonopodis pv. citri str. 306
MSSTVPPLSFARILALNAGFFGVQYSFGLQQSNMSPIYNYLGADHANLPYLWLAGPITGLVLQPFVGAWSDRSVTRWGRRMPYMVLGALVCSLCLLAMPFSTALWMAVCLLWVLDAANNVAMEPYRALVSDVLTPPQRPLGYLTQSAFTGLAQTLAYLTPPLLVGMGMNQDAANAHHIPYVTIAAFVIGAGFSAGSILLTARSVREPAIAPAEIARIRQSGAGLGATVREIGSALREMPPTMRQLAPVMLFQWYAIFCYWQYIVLSLSTTLFGTTDPTSHGFREAGLVNGQIGGFYNFVAFLAAFAMVPVVRRFGPKYTHAACLVAAGIGMWLLPGIENRWLMLLPMIGIGLAWASMMGNPYLMLADSIPPERTGVYMGLFNLFIVLPMLIQIVTLPLYYEHVLHGDPRNVVRLAGALMLAAAAAMLCVRLRKPKAVAA

SEQ ID NO: 23928 - protein, 492 aa, Xanthomonas axonopodis pv. citri str. 306
MTAKPRLDFWQIWNMCFGFLGIQFGFALQNANASRIFQTLGAQVDDVPGLWIAAPLTGLVVQPVIGYLSDRTWTPWGRRRPYFMVGAVFTTLALLVMPNAPMLWVAAGTLWVLDASINISMEPFRALVGDQLPPSQRPTGYAMQSFFIGIGAIVASFLPWLLTHWGIANTAPPGQLPDSVRYAFYLGAAVLFLSITWTVLRTREYSPEQLAGFDDAHPPLAQAVSTGMVPTSMASVLWCGLGVLLAAAIAWQHGDRMLYVLAGLCFAYGVLLALARMLPATSMLVAIVQDVRSMPMTMRRLAWVQFFSWFALFAMWIYTTAAVTQVHFGASDTASAAYNDGANWVGVLFGAYNGFAALAAVVIPLLVRAIGLRWSHLCNLWLGAAGLLSMLVIRDPQWLLLSMLGVGFAWASILSLPYALLSDSVPAPKMGVYMGIFNFFIVIPQLVAASALGFVLRVWLGGQPIYALAIGGLSLLIAGVCVVRVPVASGGQ

SEQ ID NO: 23929 - protein, 541 aa, Caulobacter crescentus CB15
MHFTLRVASARAQMPPAKRDEKFCEPAGSTGGRSGGGSMARQRLSFLQIWNMCFGFFGIQIGFGLQNANTSRIFQSLGVDVNHLAILWIAAPATGLLVQPIIGHFSDKTWGRFGRRRPYFFWGAILTTLALLVMPNSPTLWVAAAALWIMDASINITMEPFRAFVGDNLPDEQRATGYAMQSFFIGLGAVFASALPWMLTNWFDVANTAPAGQVPDSVRIAFYTGGAGLLLAVLWTVFTTREYSPEQLTAFEKAEREIAGLGLHEEPEPSVNAYIALGVGGVLLGAALALIVWGAGLEKELYVLAGLLFAFGLAGVAGARFKRIGRTDNGFSEVLADVFRMPKTMRQLAVVQFFSWFGLFAMWIYTTPAVATVHFGAVDASSKAYNEGADWVGVLFAVYNGVAALAALVIPLMVKVTSRRVSHAVCLGLGALGLLSFLVIRDPGLLWIGMVGVGFAWSSILSTPYSILAGALPARKMGVYMGIFNVFIVVPQLLAATLLGLMLKTFFGNQSIFALVLGALSFALAAAATFLVRDRVAGAPA

SEQ ID NO: 23930 - protein, 467 aa, Leuconostoc mesenteroides subsp. mesenteroides ATCC 8293
MIRANQLCFKKILEEVIMVDKKKGQGLPNLPLSTIWMLSFGFLGVQMAFSLQSSQMGRIFQTLGADPTKLGFFFILPPLAGLFVQPLVGYFSDRTWTKRFGRRMPYLLVGALVSVIVMFLLPNSGSFGFSTTAGLWFGAITILFMDLSSNVAMQPFKMVVGDMVNEDQKSYAYSIQSFLSNTGSVLATIFPFLLTAIGVANTAPKGQVPASVIISFYVGALVLVVFSLIAVFNVKEYDDATYELYHGYALNTPNDGEGGFLTLLKRAPKTFWMVTLTQFFCWMAFQYLWTYGTGAVADNIFHATDPTTAGYQNGGNWFGIMSAVYAIAAVVWSLVLSKIPANKNKTGYALSLFLGAIGFTSVFFIHSQYLLIGSFILIGISWAGMMAYPFIMVTNALPGDHMGTYLGLFNGSICLPQIVASVASFALFPALGSHFPSMILVSGILMLIGAVSVGFINEIHSNPVDAQ

SEQ ID NO: 23931 - protein, 457 aa, Leuconostoc mesenteroides subsp. mesenteroides ATCC 8293
MNIMSSNEHKKGQLPMLTSMQLFLMTFGYAGVQVAFSVQTGNMGRIFQTLGSDPTKLGFFFILPPLAGMITQPLIGLFSDKTWLPKLGRRMPYLIGGCLVSLIVLLLLPNTGSFGFGYGSMTALWFGAVTVLFMDLSANVSMQPFKMIIPDMVNEKQTDKAWSLQNIWGSLGGVIAFVFPFILTSFGVANTAARGVVPDSVKISFYVAAAILLLSTIFTIINVKEYDPETLAYYHGFRSDDKTHESFIDILKHAPKVFWTLGIVEFFVWFGIPYMWTYSTGALSENIWHVSDPASAGYQAAGNWFGILQAVYSVVAIVVGILFQRLNDKTRKMTYFLSLIAGGLGFIIVAYGHTHVSSLIGFVLIGIGWIALISIPFTILTNALDGKHDGVYLGLFNCFICIPQIVASVASFAIFPAVGKSMAHMLAIAGVFLMIGGCLIWIVKEEKTQVDMTQKGE

SEQ ID NO: 23932 - protein, 485 aa, Leuconostoc mesenteroides subsp. mesenteroides ATCC 8293
MMLPLTSGKRFQIFIYCFILFNVNGYKNNILEAEIMDDKHKGQGLPNLPLSTIWMLSFGFLGVQMAFSLQSSQMGRIFQTLGADPTKLGFFFILPPLAGLFVQPLVGYFSDRTWTKRFGRRMPYLLVGALVSVIVMFLLPNSGSFGFSTTAALWFGAITILFMDLSSNVAMQPFKMVVGDMVNEDQKSYAYSIQSFLSNTGSVLATIFPFLLTAIGVANTADKGQVPASVIISFYVGAVVLVVFSLVAVFNVKEYDDATYELYHGYALNTPNDNDGGFLTLLKRAPKTFWMVTVTQFFCWMAFQYLWTYGTGAVADNVFHATDPTTAGYQNGGNWFGILSAVYAIAAVLWSLVLSKIPAEKNKFGYALSLLLGSTGFISVFFIHSQYLLIASFILIGISWAGMMAYPFIMVTNALNGDHMGTYLGLFNGSICLPQIVASVASFVVFPALGSHFPSMILVSGVLMLLGAVSVGFIKEIHSNPVNAH

SEQ ID NO: 23933 - protein, 501 aa, Microbulbifer degradans 2-40
MNQTLQPRPRPELNFWQIWNMCFGFIGIQFGFALQTANVSRIFQTLGAEIDAIPILWIAGPITGLLVQPIIGYMSDRTWNRFGRRRPYFTIGAVAATACLFIMPHSPALWMAAGMLWIMDASFNIAMEPFRAFVGDMLPPKQRTQGFATQSFFIGVASVVASALPWMLTNWLGMENTAPEGEIPSTVVYAFYFGGAVLVTTVMWTVFRTKEYTPEEIAAFNQYEQHNDSQADTSDDHKNYVAGGIGFAAVAIASTIAIHYFELREELYILAGLAAMFGGLQLIAHILQSKGRIHNAIYQITHDLFNMPRTMVQLAIVQFFSWFALFALWIYTTPAVTAFHYGTSDTTSAMYNKGADWVGIMFAAYNAFAALAAFFIPIMARRWGQKTTHCINLMLGAAGYISMMLIKDPSWLWVSMIGIGFAWASILSLPYAMLSGALPSSKLGLYIGIFNFFIVIPQILAASVLGIAVSGLFDGQAIYALVLGGVFLIIAALATLKVNDQ

SEQ ID NO: 23934 - protein, 471 aa, Oenococcus oeni MCW
MNLSHASDSKISADIPLVNKKEKPLIKNTDKEEKHHLPKLRLSTIFAMTFGFFGINMAFSLQSSQLGRIFQTIGANPNNLGFFFILPPLAGMVIQPLIGKYSDRTWNRFGRRMPYLLIGAPAAAIVLILLPNAGSFGFGYASVAALCFGAVATLFMDLTSNICMQPFKMIIGDMVNEDQKDLAWSWQQSFSNLGGVLAAVIPFVLTLVGISNTAPKGEVPLTVKIAFYSAAIILLVTSLLTIIKVHEYDPKTYAQYHEIDLQAQKKSPSLVKLLKDAPRAFWETSVVEFFSWFAILYLWTYATGAISLNVWHTSNASSAGYQAAGNWYGVLTCIMSIAAVIWGIVVQARTKPTSRKFWYSFGLLAGAVGYFMIYFIHNKWLMIIPFCLIGISYLVINTQPFSLLTEALNGQHEGSYLGLFNCSICLPQICASVASFWLFPLMGQSMPAMFLVGGTSLVLGAISVRFVHSRF

SEQ ID NO: 23935 - protein, 529 aa, Shewanella oneidensis MR-1
MSADHTVTQLDSFSATTHSHATHSVQPELNFWQIFNMCFGFLGIQFGFALQNANVSRIFQTLGASIDEIPILWIAAPLTGLLVQPIIGYLSDNTWGCLGRRRPYFLIGAILTTLAIFVMPHSPTLWIAAGMLWIMDASINIAMEPFRAFVGDNLPPSQRTQGYAMQSFFIGIGAVVASALPYILSNFFNVANTAPAGEIADSVRYAFYFGGTVLFLAVTWTVISTKEYSPEELAAFHAKTKTDVEEQCKRSRTHKDYQFASFVWMGLGALLTFTVWAQDLDKQLYILSIGIFAFGPLQLYCALRLSQSQPSQRAQLGMVFNVVDDLFHMPKAMHQLAIVQFFSWFALFAMWIYTTSAVTSYHFGSSDVLSQAYNDGADWVGVLFASYNGFSAIAALFIPLLAKRIGIKLTHTFNMFCGGFGLISFYFIKDPNLLWLAMIGVGIAWASILSIPYAILSGTLPPKKMGVYMGIFNFFIVIPQLLAASVLGLILNGLFDGQPIYALITGGVFMLCAGIAVLFVEQPKALTPH

SEQ ID NO: 23936 - protein, 473 aa, Lactobacillus plantarum WCFS1
MNQPAVHPNKPIADVSSKPKTSTIANSLPNLPLKTIFAITFGFCGVNMAFSLQSSQMSRIFQTIGADPTKLGLFFILPPLAGLFVQPLVGKYSDRTWTRFGRRMPYLLFSAPLAALVMVLLPNAGSFGFGYASTAALLFGAIAILFMDLSSNVCMQPFRMIIGDMVNENQKDKAWSWQQAFSNLGGVLATILPFVLTYFGVANTAQKGVVPLSVRIAFYIGAIILLGISAYTIHTVKEYDPDTYALYHHINPEQHKHTKPIWQLVKEAPKAFWEVALVQLFAWIGIQYMWTYTTGAIAENVWHTTNAASAGYQAAGNWYGILTFIQSMAAVLYGFLVLSRTNPYKRKFWYRFGLASFAVGLVWVFFIHNQYLLIAPFCLIGIGFFTVHVEPFNIFTSSLDGANEGSYIGIFNGTICLPQILASVASFMVFKFVGNSMPGMMLIAGISMFIAVLAISIIKQDNPQEDLSENPTK

SEQ ID NO: 23937 - protein, 448 aa, Lactobacillus plantarum WCFS1
MKETSKTTAGLPKLSSNKIWMMSLGFLGVQMAFTLQSSQMSRIFQTLGADPNNLGWFFILPPLAGLIVQPIIGSLSDRTWAPRLGGRRLPYLILGTVVAAIVMLLLPNSGSFGFGYASMAALVFGAITVAFLDLSSNVAMQPFKMMVGDMVNDDQKSYAYGIQSFLLNTGAVIAAIFPFLLTLFGVANTASKGVIPNSVIWSFYIGAAILVVSTIITIARVREYDPVTYAKYHGIDESANKSGGNWLALLKKAPKVFWLVALVQFFCWMAFQYLWTYSTGAMAANVWHTTNASSAGYQAAGNWYGILSAVQSVAAVVWSYVLAKVPNNRHKLGYALSLLLGAIGFFSIFFIHSQSALVVSFILVGMAWAAMNTYPLTMVTNALSGEHMGTYLGLFNGSICLPQIVASLLSFALYPLFGNSQANMFIFAGIVLAVGAGTVGLIKETYKN

SEQ ID NO: 23938 - protein, 461 aa, Lactobacillus plantarum WCFS1
MMKKVSAEDTVKTSVKEDQTSFGFDNSLPNLPIKTILAMTFGCIGVNMAFTLQGSQMSRITQTIGVNPNSLGWFFLLPPLLGMFVQPLLGKYSDSTWTRWGRRIPYLLVGAPITVIVMIMLPFTGSFGFGYGSMTAMVYAAIAIALMDLFSNVCLAPYKMLAGDMVNEKQKNLAWSWQQVFGYAGGILAALLPYILTKVGIANTASKGQVPATVIWAYLIGAVMLLVTSLVTIFNVHEYDPKTYAKYHKINESKQKVTPSLWKLLKTAPRSFWELAIVQLFSWIGIMYTWTYATGAMANNIWNTTNPASSGFQAAGNWYGVMTAFYSVAALLWGLFYAKTKATQRKFWYSFGLFADAISIIIVATTHNQWVALIAFALYGIGNFTINTLPYTMLTTSLDGRNNGSYLGLFNIAVCLPQIIGSLASFIIFPLVGNSQSMMMIIGFVAMVIGGFSVAIVHEGK

SEQ ID NO: 23939 - protein, 528 aa, Citrus sinensis
MESTEAGAAAAAPTKNQSSIELRQPPPPPSSPMWKIVMVASIAAGVQFGWALQLSLLTPYVQLLGIPHKWSSLIWLCGPISGMIVQPIVGFHSDTCKSRFGRRRPFILAGAVLVAIAVFLIGYAADIGHSAGDSVTDSVKTRAIIIFVIGFWILDVANNTLQGPCRALADLSSGSSNKKTRTANSFFSFFMAVGNVLGYAAGSYTHLYHMLPFTKSKACDVYCANLKTCFFLSIALLITLTTIALFYVTEQRLEEIDDKETAPSTKDPFFSEIFGALKGLQKPMWILLAVTALNWIAWFPFLLFDTDWMGREVYGGNSKGSAEELRVYNNGVRAGSLGLMLNAIVLGFTSLGVEVLAKLIGGVKRLWGVVNFLLAVSLAFTFLITKLAESNRRSVTTAGGATHILPPPVGVKVGALAIFTVLGIPQAITFSVPFAMASIFSRTSAAGQGLSLGVLNLAIVVPQMLVSLLSGPFDAVCGGGNMPAFMVGAVAAALSGIVALTLLPSTTADVPPPITEAGTATANQTNKL

SEQ ID NO: 23940 - protein, 452 aa, Pyrococcus abyssi
MEFKYWRIFLLGFGFFGISIIWSLYNAYIPIFLQDTFRMSRTVTGFIMTIDNLFAVLLLPFLGALSDMTRTRIGRRKPYILLGAPSAAIMFALIPIARAHKNLALFMGVIVLMNFFMALFRSPVIAFMPDITPSEKRSQANGIINFMGGLGALLAYLGGKILYDINYAYPFYAGAAIMLIANMIVVLFVPEPEQYRVPGEGIDIKKIFTETAKKSFGELKENLKDVFASHERSLLAILLAIFFWFIAFNSLETFFTSYVKYHLYGIPIGAEETAVTRQIESTGAFIMGIVSLSFMIFAIPAGFLGAKLGRRKTITLGLIIIVIVLGLSYYIGQVQRPSSVSLTDPVIVKFMLLFFIAGIGWAMVNVNSLPMVVDMTTEEKVGGYTGLYYFFSQAANLVAPPLAGAFLDLIGYETLIPFAIVFFVLATITVQFVKRGDVKVGRKAIEYISDLD

SEQ ID NO: 23941 - protein, 505 aa, Vitis vinifera
MELAKPSSVFAIQDHQSSSPPTPIWKTVVVASIAAGIQFGWALQLSLLTPYVQLLGIPHKWAAFIWLCGPISGMIVQPVVGYHSDRCTSRFGRRRPFIAAGAVLVAIAVFLIGYAADIGRVSGDPLHNTIKTRAVAVFVVGFWILDVANNMLQGPCRALLADLSGTSARRTRTANALYSFFMAVGNVLGYAAGSFSKLHKMFPFARTQACDLYCANLKSCFFLSIALLLILTIIAFATVHETPLNRADIAVVEAGQPFYSQMMNAFRQLRRPMWVLLLVTCLNWIGWFPFLLFDTDWMGREVYGGTVGEGPRGRLYDLGVRAGSLGLMLNSVVLGLMSLGVEFFGRGVGGVKRLWGGVNFLLALCLALTVLVSKLAASWRHSLGGELHPPPIGIKAGALSLFAVMGVPLAITYSIPFALASIFCHSSGAGQGLSLGVLNLAIVVPQMMVSVASGPWDARFGGGNLPAFVVGAFAAALNGVLALTMLPAPPPDVPNTKDERTQPSS

SEQ ID NO: 23942 - protein, 510 aa, Plantago major
MENSNRGVGAKTIITTTPPPEEAAPIRNIFLVAAIAAGVQFGWALQLSLLTPYVQLLGIPHKWASYIWLCGPISGMIVQPVVGYFSDNCTSRFGRRRPFIAAGAGLVGVAVVLIGFAADLGHAGGDSLGDGLKPRAIGVFVFGFWILDVANNMLQGPCRALLADLSGGNTKKMANANSFFSFFMAVGNVLGYAAGSYSRMYKVFPFSKTKACDIYCANLKSCFIISITLLITLTTLALSIVREKRHVAEEQVTAAKKGFKIPVFPELFGALKDLPRPMWVLLLVTALNWIAWFGFLLFDTDWMGREVYGETQQHKAPELAVIYNKGVSAGALGLMLNSIVLGFASLGVQYMARALGGVKRLWGVVNFILAICLCMTIVITKVASHHRPYSNGVLQTPESSVKIGALVVFSALGIPLAITFSVPFALASIYSTTTGSGQGLSLGVLNLAIVIPQMIVSVASGPWDAMFGGGNLPAFVVGAVAAAASGIFAFTMLPSPPAESIKNLSVAGGH

SEQ ID NO: 23943 - protein, 503 aa, Plantago major
MGELSGIENGNKAIGEEAIPVWKFVLVASLAAGIQFGWALQLSLLTPYIQMLGLPHGAASFIWLCGPVSGLLVQPLAGYFSDRCKSRFGRRRPFIMSGACLVAAAVILIGFAADIGHSAGDDMTKKTKPRAVVVFVVGFWILDVANNMLQGPCRAFLADLSAGDEKKMTHAMSFFAFFMGIGNVLGYAAGSYNNLHRLLPFTRTDACEIFCANLKTCFLIHICLLMCLTITALSVVKEPLVNVVDDERKGGSLMVFVELFGALKNLSKPMWILMLVTCLNWIAWFPFLLYDTDWMGREVYGGKVNQSVYDMGVRAGAIGLMLNSVVLGITSILLYFFSKGAKAAKTWWLGVNIVLAVGLAGTVWVSYHAKSVRQLGASGEALPPSFEVKASALAIFAILGIPLAVTFSVPFALAAIYCSRNTNTGGAGQGLSLGVMNLSIVIPQIIVSLSSGPLDKAFGGGNLPAFIMGAVGAVFSGVLAFILLPAPKVDNGVNPFAVGGGGH

SEQ ID NO: 23944 - protein, 262 aa, Betula pendula
IAAGVQFGWALQLSPLTPYVQLLGIPHTWAPFIWLCGPISGLFVQPVVGYYSDRCTSRFGRRRPFIAAGSSLVAIAVFLIGYAADLGHVFGDPIDKTTKTRAIAVFVLGFWILDVANNMLQGPCRALLADLSGDDQRRMRTGNALYSFFMAVGNVLGFAAGSYTRLYKLFPFTSTEACDVYCANLKSCFFLSIALLLILTTIALTAVKEQILSPQPEPGTAGGEEKQVVPFFGEIFFALKGLQRPMRILLMVTCLNWIAWFP

SEQ ID NO: 23945 - protein, 525 aa, Spinacia oleracea
MAGRNIKNGENNKIAGSSLHLEKNPTTPPEAEATLKKLGLVASVAAGVQFGWALQLSLLTPYVQLLGIPHTWAAYIWLCGPISGMIVQPLVGYYSDRCTSRFGRRRPFIAAGAALVAVAVGLIGFAADIGAASGDPTGNVAKPRAIAVFVVGFWILDVANNTLQGPCRALLADMAAGSQTKTRYANAFFSFFMALGNIGGYAAGSYSRLYTVFPFTKTAACDVYCANLKSCFFISITLLIVLTILALSVVKERQITIDEIQEEEDLKNRNNSSGCARLPFFGQLIGALKDLPKPMLILLLVTALNWIAWFPFLLFDTDWMGKEVYGGTVGEGKLYDQGVHAGALGLMINSVVLGVMSLSIEGLARMVGGAKRLWGIVNIILAVCLAMTVLVTKSAEHFRDSHHIMGSAVPPPPPAGVKGGALAIFAVLGIPLAITFSIPFALASIFSASSGSGQGLSLGVLNLAIVVPQMFVSVTSGPWDAMFGGGNLPAFVVGAVAATASAVLSFTLLPSPPPEAKIGGSMGGH

SEQ ID NO: 23946 - protein, 513 aa, Arabidopsis thaliana
MGAYETEKPTKDAAALETQSPEDFDQPSPLRKIISVASIAAGVQFGWALQLSLLTPYVQLLGIPHKWSSLIWLCGPVSGMIVQPIVGFHSDRCRSKFGRRRPFIATGAALVAVAVFLIGYAADFGYKMGDKLEEKVKVRAIGIFALGFWILDVANNTLQGPCRAFLADLAAGDAKRTRVANAFFSFFMAVGNVLGYAAGSYTNLHKMFPFTMTKACDIYCANLKTCFFLSITLLLIVTVTSLWYVNDKQWSPPPRNADDDEKTSSVPLFGEIFGAFKVMKRPMWMLLIVTALNWIAWFPFLLFDTDWMGREVFGGDSDGNERSKKLYSLGVQSGAMGLMFNSIVLGFMSLGVEWIGRKLGGAKRLWGIVNFILAAGLAMTVLVTKFAEDHRKTAGDLAGPSASVKAGALSLFAVLGIPLAITFSTPFALASIFSSCSGAGQGLSLGVLNLAIVIPQMIVSLGGGPFDALFGGGNLPAFIVAAIAAAISGVLALTVLPSPPPDAPKATTMGGFH

SEQ ID NO: 23947 - protein, 512 aa, Arabidopsis thaliana
MVSHPMEKAANGASALETQTGELDQPERLRKIISVSSIAAGVQFGWALQLSLLTPYVQLLGIPHKWASLIWLCGPISGMLVQPIVGYHSDRCTSRFGRRRPFIVAGAGLVTVAVFLIGYAADIGHSMGDQLDKPPKTRAIAIFALGFWILDVANNTLQGPCRAFLADLSAGNAKKTRTANAFFSFFMAVGNVLGYAAGSYRNLYKVVPFTMTESCDLYCANLKTCFFLSITLLLIVTFVSLCYVKEKPWTPEPTADGKASNVPFFGEIFGAFKELKRPMWMLLIVTALNWIAWFPFLLFDTDWMGREVYGGNSDATATAASKKLYNDGVRAGALGLMLNAIVLGFMSLGVEWIGRKLGGAKRLWGIVNFILAICLAMTVVVTKQAENHRRDHGGAKTGPPGNVTAGALTLFAILGIPQAITFSIPFALASIFSTNSGAGQGLSLGVLNLAIVVPQMVISVGGGPFDELFGGGNIPAFVLGAIAAAVSGVLALTVLPSPPPDAPAFKATMGFH

SEQ ID NO: 23948 - protein, 512 aa, Arabidopsis thaliana
MVSHPMEKAANGASALETQTGELDQPERLRKIISVSSIAAGVQFGWALQLSLLTPYVQLLGIPHKWASLIWLCGPISGMLVQPIVGYHSDRCTSRFGRRRPFIVAGAGLVTVAVFLIGYAADIGHSMGDQLDKPPKTRAIAIFALGFWILDVANNTLQGPCRAFLADLSAGNAKKTRTANAFFSFFMAVGNVLGYAAGSYRNLYKVVPFTMTESCDLYCANLKTCFFLSITLLLIVTFVSLCYVKEKPWTPEPTADGKASNVPFFGEIFGAFKELKRPMWMLLIVTALNWIAWFPFLLFDTDWMGREVYGGNSDATATAASKKLYNDGVRAGALGLMLNAIVLGFMSLGVEWIGRKLGGAKRLWGIVNFILAICLAMTVVVTKQAENHRRDHGGAKTGPPGNVTAGALTLFAILGIPQAITFSIPFALASIFSTNSGAGQGLSLGVLNLAIVVPQMVISVGGGPFDELFGGGNIPAFVLGAIAAAVSGVLGLTVLPSPPPDAPAFKATMGFH

SEQ ID NO: 23949 - protein, 512 aa, Arabidopsis thaliana
MVSHPMEKAANGASALETQTGELDQPERLRKIISVSSIAAGVQFGWALQLSLLTPYVQLLGIPHKWASLIWLCGPISGMLVQPIVGYHSDRCTSRFGRRRPFIVAGAGLVTVAVFLIGYAADIGHSMGDQLDKPPKTRAIAIFALGFWILDVANNTLQGPCRAFLADLSAGNAKKTRTANAFFSFFMAVGNVLGYAAGSYRNLYKVVPFTMTESCDLYCASLKTCFFLSITLLLIVTFVSLCYVKEKPWTPEPTADGKASNVPFFGEIFGAFKELKRPMWMLLIVTALNWIAWFPFLLFDTDWMGREVYGGNSDATATAASKKLYNDGVRAGALGLMLNAIVLGFMSLGVEWIGRKLGGAKRLWGIVNFILAICLAMTVVVTKQAENHRRDHGGAKTGPPGNVTAGALTLFAILGIPQAITFSIPFALASIFSTNSGAGQGLSLGVLNLAIVVPQMVISVGGGPFDELFGGGNIPAFVLGAIAAAVSGVLALTVLPSPPPDAPAFKATMGFH

SEQ ID NO: 23950 - protein, 512 aa, Arabidopsis thaliana
MGALEAERAANNATALETQSSPEDLGQPSPLRKIISVASIAAGVQFGWALQLSLLTPYIQLLGIPHKWSSYMWLCGPISGMIVQPIVGYHSDRCESRFGRRRPFIAAGVALVAVSVFLIGFAADMGHSFGDKLENKVRTRAIIIFLTGFWFLDVANNTLQGPCRAFLADLAAGDAKKTRVANACFSFFMAVGNVLGYAAGSYTNLHKMFPFTMTKACDIYCANLKTCFFLSITLLLIVTFSSLWYVKDKQWSPPQGDKEEKTSSLFFFGEIFGAVRHMKRPMVMLLIVTVINWIAWFPFILYDTDWMGREVYGGNSDGDERSKKLYDQGVQAGALGLMFNSILLGFVSLGVESIGRKMGGAKRLWGCVNFILAIGLAMTVLVTKSAEHHREIAGPLAGPSSGIKAGVFSLFTVLGIPLAITYSIPFALASIFSTNSGAGQGLSLGVLNIAICIPQMIVSFSSGPLDAQFGGGNLPSFVVGAIAAAVSGVLALTVLPSPPPDAPAMSGAMGFH

SEQ ID NO: 23951 - protein, 492 aa, Arabidopsis thaliana
MSDLQAKNDVVAVDRQSSSSLADLDGPSPLRKMISVASIAAGIQFGWALQLSLLTPYVQLLGVPHKWSSFIWLCGPVSGLLVQPSVGYFSDRCTSRFGRRRPFIATGALLVAVAVVLIGYAADFGHSMGDKIDKPVKMRAVVIFALGFWILDVANNTLQGPCRAFLGDLAAGDAKKTRTANAFFSFFMAVGNVLGYAAGSYTNLYKIFPFTMTKACDIYCANLKSCFFLSITLLLVVTIIALWYVEDKQWSPKADSDNEKTPFFGEIFGAFKVMKRPMWMLLIVTALNWIAWFPFLLYDTDWMGREVYGGDSKGDDKMKKLYNQGIHVGALGLMLNSIVLGIVSLGIEGISKKIGGAKRLWGAVNIILAVCLAMTVLVTKKAEEHRRIAGPMALPTDGIRAGALTLFALLGIPLAITFSIPFALASIISSSSGAGQGLSLGVLNMAIVIPQMIVSFGVGPIDALFGGGNLPRFVVGAIAAAISSVVAFTVLP

SEQ ID NO: 23952 - protein, 509 aa, Arabidopsis thaliana
MGALEAERAANNATALETQSSPEDLSQPSPLRKIISVASIAAGVQFGWALQLSLLTPYIQLLGIPHKWSSYMWLCGPISGMIVQPIVGYHSDRCESRFGRRRPFIAAGVALVAVSVFLIGFAADMGHSFGDKLENKVRTRAIIIFLTGFWFLDVANNTLQGPCRAFLADLAAGDAKKTRVANACFSFFMAVGNVLGYAAGSYTNLHKMFPFTMTKACDIYCANLKTCFFLSITLLLIVTFSSLWYVKDKQWSPPQGDKEEKTSSLFFFGEIFGAVRHMKRPMVMLLIVTVINWIAWFPFILYDTDWMGREVYGGNSDGDERSKKLYDQGVQAGALGLMFNSILLGFVSLGVESIGRKMGGAKRLWGCVNFILAIGLAMTVLVTKSAEHHREIAGPLAGPSSGIKAGVFSLFTVLGIPLAITYSIPFALASIFSTNSGAGQGLSLGVLNIAICIPQMIVSFSSGPLDAQFGGGNLPSFVVGAIAAAISGVLALTVLPSPPPDAPAMSGAM

SEQ ID NO: 23953 - protein, 491 aa, Arabidopsis thaliana
MSDLQANKDETTVDRQSSSSVDLDGPSPLRKMISVASIAAGIQFGWALQLSLLTPYVQLLGVPHKWPSFIWLCGPVSGLLVQPSVGYFSDRCTSRFGRRRPFIATGALLVAVSVVLIGYAADFGHSMGDKIDKPVKMRAVVIFALGFWILDVANNTLQGPCRAFLGDLAAGDAQKTRTANAFFSFFMAVGNVLGYAAGSYTNLYKIFPFTMTKACDIYCANLKSCFFLSITLLLVVTIIALWYVEDKQWSPKADSDNEKTPFFGEIFGAFKVMKRPMWMLLIVTALNWIAWFPFLLYDTDWMGREVYGGDSKGDDKMKKLYNQGIHVGALGLMLNSIVLGVMSLGIEGISRKMGGAKRLWGAVNIILAVCLAMTVLVTKKAEEHRRIAGPMALPTDGIRAGALTLFALLGIPLAITFSIPFALASIISSSSGAGQRLSLGVLNMAIVIPQMIVSFGVGPIDALFGDGNLPGFVVGAIAAAVSSIVAFTVLP

SEQ ID NO: 23954 - protein, 492 aa, Arabidopsis thaliana
MSDLQANKDAAAVNRQSSSSSADLNGPSPMRKMISVASIAAGIQFGWALQLSLLTPYVQLLGVPHKWSSFIWLCGPVSGLLVQPSVGYFSDRCKSRFGRRRPFIAMGALLVAVAVVLIGYAADFGHSMGDKVDEPVKMRAVVIFALGFWILDVANNTLQGPCRAFLGDLAAGDAKKTRTANAFFSFFMAVGNVLGYAAGSYTNLYKIFPFTMTKACDIYCANLKSCFFLSITLLLVVTIIALWYVEDKQWSPKADSDNEKTPFFGEIFGAFKVMKRPMWMLLIVTALNWIAWFPFLLYDTDWMGREVYGGDSKGDDKMKKLYNQGIHVGGLGLMLNSIVLGFMSLGIEGISRKMGGAKRLWGAVNIILAVCLAMTVLVTKKAEEHRRIAGPMALPTDGIRAGALTLFALLGIPLAITFSIPFALASIISSSSGAGQGLSLGVLNMTIVIPQMVVSFGVGPIDALFGGGNLPGFVVGAIAAAISSVVAFSVLP

SEQ ID NO: 23955 - protein, 491 aa, Arabidopsis thaliana
MSDIQAKEDAAPVDRQSSSSVVVPDEPSPLRKMISVASIAAGIQFGWALQLSLLTPYVQLLGVPHKWSSFIWLCGPISGLLVQPTVGYFSDRCKSRFGRRRPFIATGALLVALAVILIGFAADFGHTMGDKLDEAVKIRAVGFFVVGFWILDVANNTLQGPCRAFLGDLAAGDAKKTRTANAIFSFFMAVGNVLGYAAGSYTNLHKIFPFTVTKACDIYCANLKSCFIISITLLIVLTIIALWYVEDKQWSPNADSDNEKTPFFGEIFGAFKVMKRPMWMLLAVTALNWIAWFPFLLYDTDWMGREVYGGDSAGDDKMKKLYNHGIQVGSLGLMLNSIVLGVMSLVIGVISKKIGAKRLWGAVNIILAVCLAMTVLVTKKAEEHRKIAGRMALPTNAIRDGALSLFAILGIPLAITFSIPFALASIISSSSGAGQGLSLGVLNMAIVIPQMIVSFGVGPIDALFGGGNLPGFVVGAIAALISSVVALTVLP

SEQ ID NO: 23956 - protein, 202 aa, Brassica napus
MGVYETEKPTKDAAVVETQSPEDFDQPSPLRKIISVASIAAGLQFGWALQLSLLTPYVQLLGIPHKWSSLIWLCGPVSGMIVQPIVGYHSDRCTSRFGRRRPFIAAGAALVAVAVFLIGYAADIGHKMGDKLEQKSPRVRAIGIFAFGFWILDVANNTLQGPCRAFLADLSAGDAKRTRVANGFFSFFMGVGNVLGYAAGLF

SEQ ID NO: 23957 - protein, 513 aa, Brassica oleracea
MGAFETENTAKDAAALETQSSLEEFNQPSPLRKIISVSSIAAGVQFGWALQLSLLTPYVQLLGIPHKWSSLIWLCGPVSGMIVQPIVGFHSDRCTSRFGRRRPFIAAGAAMVAVAVFLIGYAADIGYKMGDKLEQTPRVRAIGIFALGFWILDVANNTLQGPCRAFLADLAAGDAKRTRVANAFFSFFMAVGNVLGYAAGSFTNLHKMFPFAMTNACDLYCANLKSCFFLSITLLLIVTVTSLWYVKDKQWSPPPVAADEEKKSVPFFGEIFGAFKVMERPMWMLLIVTALNWIAWFPFLLFDTDWMGREVYGGDSEGDARLKQIYNKGVQSGALGLMFNSIVLGFMSLGVEWIGKKVGGAKRLWGIVNFILAIGLAMTVLVTKLAADYRKVAGPYAGPSPGIRAGALSLFAVLGIPLAITFSIPFALASIFSSSSGAGQGLSLGVLNLAIVIPQMIVSLGGGPFDALFGGGNLPAFIVGAIAAAISGVLAITVLPSPPPDAPALKTGAMGFH

SEQ ID NO: 23958 - protein, 508 aa, Brassica oleracea
MEKGSNGSAALEMQTSELDQPAALRKIISVSSIAAGVQFGWALQLSLLTPYVQLLGIPHKWASLIWLCGPISGMLVQPIVGYHSDRCTSRFGRRRPFIVAGAGLVTVAVFLIGYAADIGHSMGDQLDKPPRTRAIAIFALGFWILDVANNTLQGPCRAFLADLSAGNAKKTRTANAFFSFFMAVGNVLGYAAGSYKNLYKVVPFTMTKSCDLYCANLKTCFFLSITLLLLVTFMSLCYVTEKPWTPEPTADGKPSSVPFFGEIFGAFKELKRPMWMLLIVTALNWIAWFPFLLFDTDWMGREVYGGNSDATASVASKKLYNDGVRAGALGLMLNAIVLGFMSLGVEWVGRKMGGAKRLWGAVNFILAICLAMTVVVTKQAENHRRDHGGAKTGPPGNVTAGALTLFAVLGIPQAITFSIPFALASIFSTNSGAGQGLSLGVLNLAIVVPQMVVSVGGGPFDELFHGGNIPAFVLGAIAAAVSGILALTVLPSPPPDAPAFKTGAMGFH

SEQ ID NO: 23959 - protein, 119 aa, Penicillium marneffei
PFLLSLGMSKALLAIVWVAGPLTGTLVQPYIGILSDNCRIPWGKRKPFMIGGGLATIFCLMLLAWVREIIAGVLGIFGADAQSSGVKVTTLVFATIMMFCLDFAINTGMFWICLVLLHC

SEQ ID NO: 23960 - protein, 78 aa, Cicer arietinum
STHIEPLGLGQGLSMGVLNLAIVVPQIVVSLGSGPWDQIFGGGNSPAFAVAAVAALMSGLLALLAIPRTGTQKPRSRV

SEQ ID NO: 23961 - protein, 524 aa, Pisum sativum
MEPLSSTKQINNNNNNLAKPSSLHVETQPLEPSPLRKIMVVASIAAGVQFGWALQLSLLTPYVQLLGIHHTWAAYIWLCGPISGMLVQPVVGYHSDRCTSRFGRRRPFIAAGSIAVAIAVFLIGYAADLGHSFGDNLDKKVRPRAIGIFVVGFWILDVANNMLQGPCRALLGDLCAGNQRKTRNANAFFSFFMAVGNVLGYAAGAYSKLYHVFPFTKTEACNVYCANLKSCFFLSIALLTVLATAALIYVKETPLIAEKAVVTAEDGGSNGGMPCFGQLSGAFKELKRPMWILLLVTCLNWIAWFPFLLFDTDWMGKEVYGGTVGEGHAYDMGVRAGALGLMLNSVVLGATSLGVDILARGVGGVKRLWGIVNFLLAICLGLTVLVTKLAQHSRQYAPGTGGLQDPLPPSGGIKAGALTLFSVLGIPLAITYSIPFALASIFSSTSGAGQGLSLGVLNLAIVIPQMFVSVLSGPWDALFGGGNLPAFVVGAVAALASGILSMILLPSPPPDMAKSVSATGGGFH

SEQ ID NO: 23962 - protein, 523 aa, Vicia faba
MEPLSSTKQINNNNNLAKPSSLHVETQPLEPSPLRKIMVVASIAAGVQFGWALQLSLLTPYVQLLGIHHTWAAYIWLCGPISGMLVQPIVGYHSDRCTSRFGRRRPFIAAGSIAVAIAVFLIGYAADLGHSFGDSLDQKVRPRAIGIFVVGFWILDVANNMLQGPCRALLGDLCAGNQRKTRNANAFFSFFMAVGNVLGYAAGAYSKLYHVFPFTKTKACNVYCANLKSCFFLSIALLTVLATSALIYVKETALTPEKTVVTTEDGGSSGGMPCFGQLSGAFKELKRPMWILLLVTCLNWIAWFPFLLFDTDWMGKEVYGGTVGEGHAYDMGVREGALGLMLNSVVLGATSLGVDILARGVGGVKRLWGIVNFLLAICLGLTVLVTKLAQHSRQYAPGTGALGDPLPPSEGIKAGALTLFSVLGVPLAITYSIPFALASIFSSTSGAGQGLSLGVLNLAIVIPQMFVSVLSGPWDALFGGGNLPAFVVGAVAALASGILSIILLPSPPPDMAKSVSATGGGFH

SEQ ID NO: 23963 - protein, 533 aa, Ricinus communis
MQSSTSKENKQPPSSQPHPPPLMVAGAAEPNSSPLRKVVMVASIAAGIQFGWALQLSLLTPYVQLLGIPHTWAAFIWLCGPISGMLVQPIVGYHSDRCTSRFGRRRPFIASGAAFVAIAVFLIGYAADLGHLSGDSLDKSPKTRAIAIFVVGFWILDVANNMLQGPCRALLADLSGTSQKKTRTANALFSFFMAVGNVLGYAAGAYTHLYKLFPFTKTTACDVYCANLKSCFFISIVLLLSLTVLALSYVKEKPWSPDQAVDNAEDDTASQASSSAQPMPFFGEILGAFKNLKRPMWILLLVTCLNWIAWFPFLLFDTDWMGREVYGGDSSGSAEQLKLYDRGVRAGALGLMLNSVVLGFTSLGVEVLARGVGGVKRLWGIVNFVLAVCLAMTVLVTKQAESTRRFATVSGGAKVPLPPPSGVKAGALALFAVMGVPQAITYSIPFALASIFSNTSGAGQGLSLGVLNLSIVIPQMIVSVAAGPWDALFGGGNLPAFVVGAVAALASGIFALTMLPSPQPDMPSAKALTAAFH

SEQ ID NO: 23964 - protein, 334 aa, Ricinus communis
EGVQFGWALQLSLLTPYVQLLGIPHTWAAFIWLCGPISGMLVQPIVGYHSDRCTSRFGRRRPFIASGAAFVAIAVFLIGYAADLGHLSGDSLDKSPKTRAIAIFVVGFWILDVANNMLQGPCRALLADLSGTSQKKTRTANALFSFFMAVGNVLGYAAGAYTHLYKLFPFTKTTACDVYCANLKSCFFISIVLLLSLTVLALSYVKEKPWSPDQAVDNAEDDTASQASSSAQPMPFFGEILGAFKNLKRPMWILLLVTCLNWIAWFPFLLFDTDWMGREVYGGDSSGSAEQLKLYDRGVRAGALGLMLNSVVLGFTSLGVEVLARGVGGANRFW

SEQ ID NO: 23965 - protein, 306 aa, Ricinus communis
MVASIAAGIQFGWALQLSLLTPYVQLLGIPHTWAAFIWLCGPISGMLVQPIVGYHSDRCTSRFGRRRPFIASGAAFVAIAVFLIGYAADLGHLSGDSLDKSPKTRAIAIFVVGFWILDVANNMLQGPCRALLADLSGTSQKKTRTANALFSFFMAVGNVLGYAAGAYTHLYKLFPFTKTTACDVYCANLKSCFFISIVLLLSLTVLALSYVKEKPWSPDQAVDNAEDDTASQASSSAQPMPFFGEILGAFKNLKRPMWILLLVTCLNWIAWFPFLLFDTDWMGREVYGGDSSGSAEQLKLYDRGVR

SEQ ID NO: 23966 - protein, 530 aa, Euphorbia esula
METQLATKNPSSQPPPPPPELAAPPSSNLKKIVVVASIAAGVQFGWALQLSLLTPYVQLLGIPHTWAAFIWLCGPISGMLVQPIVGYHSDRCTSRFGRRRPFIAAGAASVAVAVFLIGYAADLGHMSGDSIGKSPKIRAIAIFVVGFWILDVANNMLQGPCRALLADLSGTSQKKTRLANALFSFFMAVGNILGYAAGAYTHLYKIAPFTLTKACDVYCANLKTCFFISIALLLVLTVIALTYVKEKQWSPEIAKTVAGVDGDDEDGPVEAAPLPFFGEIFAALKNLQRPMRILLLVTCLNWIAWFPFLLFDTDWMGREVYGGSSDSSATAGESKLYDRGVRAGALGLMLNSVVLGFTSLGVELMARKLGKVKRLWGIVNFLLAICLALTILITKLAESGRHYPTVNGVVSTTPSPPSSGIKAGALTLFAVMGIPQAITYSVPFALASIFSNDSGAGQGLSLGVLNLSIVIPQMLVSVASGPFDALFGGGNLPAFVVGAVAAAASGVLALTYLPSPPPDLPAKALTVGFH

SEQ ID NO: 23967 - protein, 538 aa, Oryza sativa (indica cultivar-group)
MARGSGAGGGGGGGGGGLELSVGVGGGGGARGGGGGEAAAAVETAAPISLGRLILSGMVAGGVQYGWALQLSLLTPYVQTLGLSHALTSFMWLCGPIAGMVVQPCVGLYSDRCTSKWGRRRPYILTGCVLICLAVVVIGFSADIGYAMGDTKEDCSVYHGSRWHAAIVYVLGFWLLDFSNNTVQGPARALMADLSGRHGPGTANSIFCSWMAMGNILGYSSGSTNNWHKWFPFLKTRACCEACANLKGAFLVAVIFLSLCLVITLIFAKEVPFKGNAALPTKSNEPAEPEGTGPLAVLKGFRNLPTGMPSVLIVTGLTWLSWFPFILYDTDWMGREIYHGDPKGTDPQIEAFNQGVRAGAFGLLLNSIVLGFSSFLIEPMCRKVGPRVVWVTSNFLVCIAMAATALISFWSLKDFHGTVQKAITADKSIKAVCLVLFAFLGVPLAVLYSVPFAVTAQLAATRGGGQGLCTGVLNISIVIPQVVIALGAGPWDELFGKGNIPAFGLASGFALIGGVAGIFLLPKISKRQFRSVSMGGGH

SEQ ID NO: 23968 - protein, 506 aa, Oryza sativa (indica cultivar-group)
MAVDMELDGGGDGKGKAPPQISLSGLFLACMVAGGVQYGWALQLSLLTPYIQTLGIPHALTSVMWLCGPIAGLIVQPCVGLYSDKCTSSLGRRRPFILTGCIIICISVIVIGFSSDIGYALGDATEDCKVYRGPRYHAAAAFILGFWLLDFSNNTVQGPARALMADLSGRHGPSAANAIFCSWMALGNILGYSSGSTNDWHKWFPFLMTRACCEACANLKAAFLVAVVFLGLSTAVTMVFAREVALDPVAAAKRNEGEASGPLAVFKGMKNLPVGMPSVLIVTGLTWLSWFPFILFDTDWMGREIYHGRPDGSPAEVTAFQEGVRQGAFGLLLNSIVLGISSFLIEPMCRRLGARAVWVMSSAVVCVAMAAVSVLSAWSLGDFGGSVQDAARAPAEEGGVRASALALFVFLGLPFAVLCSVPFAVTAQLTASRGGGQGLCTGVLNISIVVPQMAIALGAGPWDELFGEGNIPAFAMASVFAAAAAAAGVVLLPKVSVRSVSMAGGH

SEQ ID NO: 23969 - protein, 515 aa, Daucus carota
MENGTKELNKPQPPSSAAMQLQTPVQKIPTATWKLVLVAAIAAGVQFGWALQLSLLTPYVQLLGIPHKWAAYIWLCGPISGMLVQPIVGYYSDHCQSSFGRRRPFIASGAGCVAISVILIGFAADIGYKAGDDMSKTLKPRAVTVFVIGFWILDVANNMLQGPCRALLADLCSGDTRRMRSANAFYSFFMAVGNILGYAAGSYNNLYKLFPFSKTHACDLYCANLKSCFIISIALLIIITVVALSVVREKQWSPDDADAADEPPSSGKIPVFGELLGALKDLPRPMLLLLIVTCLNWIAWFPFILFDTDWMGREIYGGTAGKGKLYDQGVRAGSLGLLLNSVVLGLTSIAVEYLVRGVGGVKILWGVVNFILAIGLVMTVVVSKVAQHQREHSANGQLLPPSAGVKAGALSLFSILGIPLSITYSIPFALASIYSSGSGAGQGLSLGVLNLAIVVPQMIVSVLAGPFDSLFGGGNLPAFVVGAISAAISGVLAIVLLPKPSKDAASKLSLSGTYH

SEQ ID NO: 23970 - protein, 515 aa, Daucus carota
MENGTKELNKPQPPSSAAMQLQTPVQKIPTATWKLVLVAAIAAGVQFGWALQLSLLTPYVQLLGIPHKWAAYIWLCGPISGMLVQPIVGYYSDHCQSSFGRRRPFIASGAGCVAISVILIGFAADISYKAGDDMSKTLKPRAVTVFVIGFWILDVANNMLQGPCRALLADLCSGDTRRMRSANAFYSFFMAVGNILGYAAGSYNNLYKLFPFSKTHACDLYCANLKSCFIISIALLIIITVVALSVVRENSGPPDDADAAEEPPSSGKIPVFGELLGALKDLPRPMLLLLIVTCLNWIAWFPFILFDTDWMGREIYGGTAGQGKLYDQGVRAGALGLLLNSVVLGLTSIAVEYLVRGVGGVKILWGFVNFILAIGLVMTVVVSKVAQHQREHSANGQLLPPSAGVKAGALSLFSILGIPLSITYSIPFALASIYSSGSGAGQGLSLGVLNLAIVVPQMIVSVLAGPFDSLFGGGNLPAFVVGAISAAISGVLAIVLLPKPSKDAASKLSLSGTYH

SEQ ID NO: 23971 - protein, 515 aa, Daucus carota
MENGTKELNKPQPPSSAAMQLQTPVQKIPTATWKLVLVAAIAAGVQFGWALQLSLLTPYVQLLGIPHKWAAYIWLCGPISGMLVQPIVGYYSDHCQSSFGRRRPFIASGAGCVAISVILIGFAADISYKAGDDMSKTLKPRAVTVFVIGFWILDVANNMLQGPCRALLADLCSGDTRRMRSANAFYSFFMAVGNILGYAAGSYNNLYKLFPFSKTHACDLYCANLKSCFIISIALLIIITVVALSVVRENSGPPDDADAAEEPPSSGKIPVFGELLGALKDLPRPMLLLLIVTCLNWIAWFPFILFDTDWMGREIYGGTAGKGKLYDQGVRAGALGLLLNSVVLGLTSIAVEYLVRGVGGVKILWGFVNFILAIGLVMTVVVSKVAQHQREHSANGQLLPPSAGVKAGALSLFSILGIPLSITYSIPFALASIYSSGSGAGQGLSLGVLNLAIVVPQMIVSVLAGPFDSLFGGGNLPAFVVGAISAAISGVLAIVLLPKPSKDAASKLSLSGTYH

SEQ ID NO: 23972 - protein, 512 aa, Apium graveolens
MENGTKELNKQPPPSAAMQVQTSPPKLPIATWKLILVAAIAAGVQFGWALQLSLLTPYVQLLGIPHKWAAYIWLCGPISGMLVQPIVGYYSDRCQSSFGRRRPFIASGAGCVAISVILIGFAADIGYKAGDDMTKTLKPRAVTGFVIGFWILDVANNMLQGPCRALLADLCNGDTRRMRSANAFYSFFMAVGNILGYAAGSYNNLYKLFPFSKTHACDLYCANLKSCFIISIVLLIFITVLALTVVREKQWSPDEADEEPPSSGKIPVFGELFGALKDLPRPMLMLLVVTCLNWIAWFPFILFDTDWMGREIYGGTAGQGKLYDQGVRVGSLGLLLNSVVLGLTSIAVEYLVRGVGGVKILWGLVNFLLAIGLVMTVVVSKVAQHQRQHGANGQLLPPSAGVKAGALSLFSILGIPLSITFSIPFALASIYSSGSGAGQGLSLGVLNLAIVVPQMIVSVLAGPFDSLFGGGNLPAFVVGAISAAISGVLAIVLLPKPSKDAAAKLTLSGPYH

SEQ ID NO: 23973 - protein, 512 aa, Apium graveolens
MENGTKELNKQPPPSAAMQVQTSPPKLPIATWKLILVAAIAAGVQFGWALQLSLLTPYVQLLGIPHKWAAYIWLCGPISGMLVQPIVGYYSDRCQSSFGRRRPFIASGAGCVAISVILIGFAADIGYKAGDDMNKTLKPRAVTVFVIGFWILDVANNMLQGPCRALLADLCNGDTRRMRSANALYRFFMAVGNILGNAAGSYNNLYKLFPFSKTHACDLYCANLKSCFIISIVLLIFITVLALTVVREKQWSPDEADEEPPSSGKIPVFGELLRALKDLPRPMLMLLAVTCLNWIAWFPFILFDTDWMGREIYGGTAGQGKLYDQGVRVGSLGLLLNSVVLGLTSIAVEYLVRGVGGVKILWGLVNFLLAIGLVMTVVVSKVAQHQRQHGANGQLLPPSAGVKAGALSLFSILGIPLSITFSIPFALASIYSSGSGAGQGLSLGVLNLAIVVPQMIVSVLAGPFDSLFGGGNLPAFVVGAISAAISGVLAIVLLPKPCKDAAAKLTLSGPYH

SEQ ID NO: 23974 - protein, 157 aa, Apium graveolens
ILGFWILDVANNMMQGPCRALLADMSGHNHKKTRTANSYYSFFMAVGNVLGYAAGSYTDLYKVFPFTKTKACDVYCVNLKTCFIFAIILLLVLTTAAMTLVKERPLVLSHQSNADQDEEDEEEVSMPFFGQILSALGNLSRSMWMLIVVTSLNWIAW

SEQ ID NO: 23975 - protein, 429 aa, Lycopersicon esculentum
MENGTKGKLTVSSSLQIEQPLPPSKLWKIIVVASIAAGVQFGWALQLSLLTPYVQLLGIPHRFASFIWLCGPISGMIVQPVVGYYSDNCSSRFGRRRPFIAAGAALVTIAVFLIGFAADLGHASGDPLGKGSKPRAIAVFVVGFWILDVANNMLQGPCRALLADLSGGKSGKMRTANAFFSFFKAVGNILGYAAGSYSRLFKVFPFSKTKACDMYRANLKSCFFIAIFLLLSLTTLALTLVRENELPEKEELEIDEKLSGAGKSKVPFFGEIFGALKDLPRPMWILLLVTCLNWIAWFPFFLYDTDWMAKEVFGGQVGDAKLYDLGVRAGALGLLLQSVVLGFMSLGVEFLGKKIGGAKRLWGILNFVLAICLAMTILVTKMAEKSRGHDAAGTLMGPTPGVKIGALLLFAALGIPLAVTFSIPFALAS

SEQ ID NO: 23976 - protein, 428 aa, Lycopersicon esculentum
MENGTKGKLTVSSSLQIEQPLPPSKLWKIIVVASIAAGVQFGWALQLSLLTPYVQLLGIPHRFASFIWLCGPISGMIVQPVVGYYSDNCSSRFGRRRPFIAAGAALVTIAVFLIGFAADLGHASGDPLGKGSKPRAIAVFVVGFWILDVANNMLQGPCRALLADLSGGKSGKMRTANAFFSFFKAVGNILGYAAGSYSRLFKVFPFSKTKACDMYRANLKSCFFIAIFLLLSLTTLALTLVRENELPEKEELEIDEKLSGAGKSKVPFFGEIFGALKDLPRPMWILLLVTCLNWIAWFPFFLYDTDWMAKEVFGGQVGDAKLYDLGVRAGALGLLLQSVVLGFMSLGVEFLGKKIGGAKRLWGILNFVLAICLAMTILVTKMAEKSRGHDAAGTLMGPTPGVKIGALLLFAALGIPLAVTFSIPFALA

SEQ ID NO: 23977 - protein, 507 aa, Nicotiana tabacum
MENGTKKLNVSSLAVEQPLPKSKLWKIIMVASIAAGVQFGWALQLSLLTPYVQLLGIPHKFASFIWLCGPISGMIVQPVVGYYSDNCSSRFGRRRGFIAAGAALVTIAVFLIGFAADLGHATGDPLGKGSKPRAIAVFVVGFWILDVANNMLQGPCRALLADLSGGKARMRTSNAFFSFFMAVGNVLGYAAGSYSRLCKIFPFSKTPACDIYCANLKSCFFIAVFLLLSLTILALTVVRENELPEKDEHEIDEKAGARKSKVPFFGEIFGALKDLPRPMWILLLVTSLNWIARFPFFLYDTDWMAKEVYGGKVGDGRLYDLGVHAGALGLLLNSVVLGFMSLSVEFLGKKIGGVKRLWGILNFVLAVCMALTVLVTKMAEKSRQYDAHGTLMAPTSGVKIGALTLFAVLGIPLAVTFSVPFALASIFSSNAGSGQGLSLGVLNLAIVVPQMLVSIAGGPWDDLFGGGNLPGFIVGAVAAAASGILALTMLPSPPADAKPATTMGGFH

SEQ ID NO: 23978 - protein, 521 aa, Nicotiana tabacum
MESGSMEMKVQQPYLAVPVLPPRWKIVMVASIAAGVQFGWALQLSLLTPYLQLLGIPHRYASIIWLCGPISGMIVQPAVGYLSDNLSSTFGRRRPFIAAGSSLVAVAVIFIGFAADIGHAFGDPLDTKTKPLGIITFIVGFWYLDVANNMLQGPCRAFLADLSGGKACRIRTGQSCYAFFMAVGSILGNAAGSYSHLYTIFPFTKTEACGVQCANLKSCFLISVVLLLTLTTLALTAVDEKVLPQKDHFINSEYLGSSGKKGGLLFFGEMFEALKHLPRSVWILLMVTAVNWIAWFPFTLYGTDWMGKEVYGGRVRDGNLYNKGVHAGVFGLLLSSVVLCLMSLGVECVGKWLGGAKRLWGIVNFILAICLAMTVFVTKMADKSRRYDGDGELLPPDQGVKISALLLNAVTGIPLAVLYSIPFAMASIYSSNVGAGQGLSQGVINLAIVVPQTLVSISGRPFDALFGGGNLPAFVAGAVAAAVSGILALTLLPSPTEPCQTYPHFRRCFPMTKYWTSQNKF

SEQ ID NO: 23979 - protein, 300 aa, Nicotiana tabacum
LCGPISGMIVQPVVGYYSDNCSSRFGRRRPFIAAGAALVTIAVFLIGFAADLGHASGDPLGKGSKPRAIAVFVVGFWILDVANNMLQGPCRALLADLSGGKAGRMRTSNAFFSFFMAVGNVLGYAAGSYSRLYKIFPFSKTPACDIYCANLKSCFFIAVFLLLSLTILALTVVRENELPEKDEHEIDEKAGGGGKSKVPFFGEIFGALKDLPRPMWILLLVTCLNWIAWFPFFLYVTDWMAKEVYGGKVGDGRLYDLGVHAGALGLLLNSVVLGFMSLSVEFLGKKIGGVKRLWGILNFV

SEQ ID NO: 23980 - protein, 516 aa, Solanum tuberosum
MENGTKREGLGKLTVSSSLQVEQPLAPSKLWKIIVVASIAAGVQFGWALQLSLLTPYVQLLGIPHKFASFIWLCGPISGMIVQPVVGYYSDNCSSRFGRRRPFIAAGAALVMIAVFLIGFAADLGHASGDTLGKGFKPRAIAVFVVGFWILDVANNMLQGPCRALLADLSGGKSGRMRTANAFFSFFMAVGNILGYAAGSYSHLFKVFPFSKTKACDMYCANLKSCFFIAIFLLLSLTTIALTLVRENELPEKDEQEIDEKLAGAGKSKVPFFGEIFGALKELPRPMWILLLVTCLNWIAWFPFFLYDTDWMAKEVFGGQVGDARLYDLGVRAGAMGLLLQSVVLGFMSLGVEFLGKKIGGAKRLWGILNFVLAICLAMTILVTKMAEKSRQHDPAGTLMGPTPGVKIGALLLFAALGIPLAATFSIPFALASIFSSNRGSGQGLSLGVLNLAIVVPQMLVSLVGGPWDDLFGGGNLPGFVVGAVAAAASAVLALTMLPSPPADAKPAVAMGLSIK

SEQ ID NO: 23981 - protein, 754 aa, Dictyostelium discoideum
MTYNNSNSKNKIKNKYYKQEDETINEDENDIKEEEEEEEEKEEKEGNINNNNNSNKINIEKDTNFIDKTNLGNGEGDSGGGGGDSGGGCGGGGNDDGKEKKNKLKANEHAPKILSSYSISSSCGNPHHSETSTTPKQPMTTTTTTTTASTANSLSSLNTSSSLGASSSGILNTSNENTPIIGGVLKIDNEILLNSGHKKTLPLFNLICLTICFLGVQFGWALQIAFSTPLFLELGVEQKWVSYIWLAGPISGLIVQPLVGVITDRSECRFGRRKPFILIGSVFISIGLVLISNAETFGSYFGDSEQKKSIAISIAIVGFWILDLSNNAVQAPCRALLVDIAAPSQQSLGSSLFSLMLGTGNLLGYMMGSIDLVRMVPFMKTDTRALFTLSIMVLLFCVVMTLGFVTEEQYIRVNEDQSVENPLKTMFKGIVKMPTYLQRLCAVQFFSWIGWFSFVLFITTWVGVNVFGGDPNAPEYSDSRILFQDGVRWGSLSLTISSGITIAVSLLIPFLVKFIDMKYIYIGGNLLQCIFFALFYFVESKIGSLLLIASTGIPWAIVMILPFSIVGMGVEDNESSGLNIGTLNIFVVVPQMVVSLGIGLILDLSKGNVVYSLLTGSVASFFATLFCFRIIIPKHHGHPIGDIEEIHFNIENNNSGNKYSPMYKSDNNNNNNTNNNNNNNNNNNNNNNNNNNNNNNNFNNNNNNNSDNNNNNQSIINNNKIDNNKSPNQKDIEPILNLNDSYQVNQSQQSYSNY

SEQ ID NO: 23982 - protein, 506 aa, Oryza sativa
MAVDMELDGGGDGKGKAPPQISLSGLFLACMVAGGVQYGWALQLSLLTPYVQTLGIPHALTSVMWLCGPIAGLIVQPCVGLYSDKCTSSLGRRRPFILTGCIIICISVIVIGFSSDIGYALGDTTEDCKVYRGPRYHAAAAFILGFWLLDFSNNTVQGPARALMADLSGRHGPSAANAIFCSWMALGNILGYSSGSTNDWHKWFPFLMTRACCEACANLKAAFLVAVVFLGLSTAVTMVFAREVALDPVAAAKRNEGEASGLLAVFKGMKNLPVGMPSVLIVTGLTWLSWFPFILFDTDWMGREIYHGRPDGSPAEVTAFQEGVRQGAFGLLLNSIVLGISSFLIEPMCRRLGARAVWVMSSAVVCVAMAAVSVLSAWSLGDFGGSVQDAARAPAEEGGVRASALALFVFLGLPFAVLCSVPFAVTAQLAASRGGGQGLCTGVLNISIVVPQMAIALGAGPWDELFGEGNIPAFAMASVFAAAAAAAGVVLLPKVSVRSVSMAGGH

SEQ ID NO: 23983 - protein, 537 aa, Oryza sativa
MARGSGAGGGGGGGGGGLELSVGVGGGGARGGGGGEAAAAVETAAPISLGRLILSGMVAGGVQYGWALQLSLLTPYVQTLGLSHALTSFMWLCGPIAGMVVQPCVGLYSDRCTSKWGRRRPYILTGCVLICLAVVVIGFSADIGYAMGDTKEDCSVYHGSRWHAAIVYVLGFWLLDFSNNTVQGPARALMADLSGRHGPGTANSIFCSWMAMGNILGYSSGSTNNWHKWFPFLKTRACCEACANLKGAFLVAVIFLSLCLVITLIFAKEVPFKGNAALPTKSNEPAEPEGTGPLAVLKGFRNLPTGMPSVLIVTGLTWLSWFPFILYDTDWMGREIYHGDPKGTDPQIEAFNQGVRAGAFGLLLNSIVLGFSSFLIEPMCRKVGPRVVWVTSNFLVCIAMAATALISFWSLKDFHGTVQKAITADKSIKAVCLVLFAFLGVPLAVLYSVPFAVTAQLAATRGGGQGLCTGVLNISIVIPQVVIALGAGPWDELFGKGNIPAFGLASGFALIGGVAGIFLLPKISKRQFWSVSMGGGH

SEQ ID NO: 23984 - protein, 539 aa, Oryza sativa
  unsure (1)..(539): unsure at all Xaa locations
MARGSGAGGGGGGGGGGLELSVGVGGGGGARGGGGGEAAAAVETAAPISLGRLILSGMVAGGVQYGWALQLSLLTPYVQTLGLSHALTSFMWLCGPIAGMVVQPCVGLYSDRCTSKWGRRRPYILTGCVLICLAVVVIGFSADIGYAMGDTKEDCSVYHGSRWHAAIVYVLGFWLLDFSNNTVQGPARALMADLSGRHGPGTANSIFCSWMAMGNILGYSSGSTNNWHKWFPFLKTRACCEACANLKGAFLVAVIFLSLCLVITLIFAKEVPFKGNAAPPNXKSNEPAEPEGTGPLAVLKGFRNLPTGMPSVLIVTGLTWLSWFPFILYDTDWIGREIYHGDPKGTDPQIEAFNQGVRAGAFGLLLNSIVLGFSSFLIEPMCRKVGPRVVWVTSNFLVCIAMAATALISFWSLKDFHGTVQKAITADKSIKAVCLVLFAFLGVPLAVLYSVPFAVTAQLAATRGGGQGLCTGVLNISIVIPQVVIALGAGPWDELFGKGNIPAFGLASGFALIGGVAGIFLLPKISKRQFRSVSMGGGH

SEQ ID NO: 23985 - protein, 342 aa, Oryza sativa
PGLQAVLTVGFSADLGRIFGDSITPGSTRLGAIIVYLVGFWLLDVGNNATQGPCRAFLADLTENDPRRTRIANAYFSLFMALGNILGYATGAYSGWYKIFPFTVTPSCSISCANLKSAFLLDIIILVVTTCITVASVQEPQSLGSDEADHPSTEQEAFLWELFGSFRYFTLPVWMVLIVTALTWIGWFPFILFDTDWMGREIYRGSPDDPSITQSYHDGVRMGSFGLMLNSVLLGFTSIVLEKLCRKWGAGLVWGVSNILMALCFVAMLVITYVAKNMDYPPSGVPPTGIVIASLVVFTILGAPLAITYSIPYAMAASRVENLGLGQGLAMGILNLAIVIPQ

SEQ ID NO: 23986 - protein, 525 aa, Oryza sativa
  unsure (1)..(525): unsure at all Xaa locations
LVLWXVSAIIKFSFFFVSXPGMSNTPNTIVYXCPVIXLQVQPCVGVWSDKCRSKYGRRRPFILAGCLMICFAVTLIGFSADLGYILGDTTEHCSTYKGSRFRAAIIFVLGFWMLDLANNTVQGPARALLADLSGPDQCNSANAIFCTWMAVGNVLGFSSGASGNWHKWFPFLMTRACCEACSNLKAAFLVAVVFLLFCMSVTLYFAEEIPLEPTDAQRLSDSAPLLNGSRDXXNNASNEPRNGALPNGHTDGSNVPANSNAEDSNSNRENVEVFNDGPGAVLVNILTSMRHLPPGMYSVLLVMALTWLSWFPFFLFDTDWMGREVYHGDPNGNLSERKAYDNGVREGAFGLLLNSVVLGIGSFLVDPLCRLMGARLVWAISNFTVFICMLATAILSWISFDLYSSKLHHIIGANKTVKNSALIVFSLLGLPLSITYSVPFSVTAELTAGTGGGQGLATGVLNLAIVVPQIVVSLGAGPWDALFGGGNVPAFALASVFSLGAGVLAVLKLPKLPNSYRSAGFHGFG

SEQ ID NO: 23987 - protein, 414 aa, Oryza sativa
  unsure (1)..(414): unsure at all Xaa locations
VQPCVGVWSDKCRSKYGRRRPFILAGCLMICFAGPARALLADLSGPDQCNSANAIFCTWMAVGNVLGFSSGASGNWHKWFPFLMTRACCEACSNLKAAFLVAVVFLLFCMSVTLYFAEEIPLEPTDAQRLSDSAPLLNGSRDXXNNASNEPRNGALPNGHTDGSNVPANSNAEXTPIQTERMSKFSXDGPGAVLVNILTSMRHLPPGMYSVLLVMALTWLSWFPFFLFDTDWMGREVYHGDPNGNLSERKAYDNGVREGAFGLLLNSVVLGIGSFLVDPLCRLMGARLVWAISNFTVFICMLATAILSWISFDLYSSKLHHIIGANKTVKNSALIVFSLLGLPLSITYSVPFSVTAELTAGTGGGQGLATGVLNLAIVVPQELVSSRSLSYPSCQTLTDLLGSMDLAEQNTSRM

SEQ ID NO: 23988 - protein, 344 aa, Oryza sativa
GLQGSSLPCSGGIHPRILAARLLQQHRAGSSSRSDGRFVRWFPFLMTRACCEACANLKAAFLVAVVFLGLSTAVTMVFAREVALDPVAAAKRNEGEASGLLAVFKGMKNLPVGMPSVLIVTGLTWLSWFPFILFDTDWMGREIYHGRPDGSPAEVTAFQEGVRQGAFGLLLNSIVLGISSFLIEPMCRRLGARAVWVMSSAVVCVAMAAVSVLSAWSLGDFGGSVQDAARAPAEEGGVRASALALFVFLGLPFAVLCSVPFAVTAQLAASRGGGQGLCTGVLNISIVVPQMAIALGAGPWDELFGEGNIPAFAMASVFAAAAAAAGVVLLPKVSVRSVSMAGGH

SEQ ID NO: 23989 - protein, 436 aa, Oryza sativa
MARGSGAGGGGGGGGGGLELSVGVGGGGGARGGGGGEAAAAVETAAPISLGRLILSGMVAGGVQYGWALQLSLLTPYVQTLGLSHALTSFMWLCGPIAGMVVVVIGFSADIGYAMGDTKEDCSVYHGSRWHAAIVYVLGFWLLDFSNNTVQIFLSLCLVITLIFAKEVPFKGNAALPTKSNEPAEPEGTGPLAVLKGFRNLPTGMPSVLIVTGLTWLSWFPFILYDTDWMGREIYHGDPKGTDPQIEAFNQGVRAATNHGLLIVQIVLGFSSFLIEPMCRKVGPRVVWVTSNFLVCIAMAATALISFWSLKDFHGTVQKAITADKSIKAVCLVLFAFLGVPLAVLYSVPFAVTAQLAATRGGGQGLCTGVLNISIVIPQVVIALGAGPWDELFGKGNIPAFGLASGFALIGGVAGIFLLPKISKRQFRSVSMGGGH

SEQ ID NO: 23990 - protein, 522 aa, Triticum aestivum
MARGGGNGEVELSVGVGGGGAGAGGADAPAVDISLGRLILAGMVAGGVQYGWALQLSLLTPYVQTLGLSHALTSFMWLCGPIAGLVVQPCVGLYSDKCTSRWGRRRPFILTGCILICIAVVVVGFSADIGAALGDSKEECSLYHGPRWHAAIVYVLGFWLLDFSNNTVQGPARALMADLSAQHGPSAANSIFCSWMALGNILGYSSGSTNNWHKWFPFLRTRACCEACANLKGAFLVAVLFLAFCLVITVIFAKEIPYKAIAPLPTKANGQVEVEPTGPLAVFKGFKNLPPGMPSVLLVTGLTWLSWFPFILYDTDWMGREIYHGDPKGTPDEANAFQAGVRAGAFGLLLNSVVLGFSSFLIEPLCKRLGPRVVWVSSNFLVCLSMAAICIISWWATQDLHGYIQHAITASKEIKIVSLALFAFLGIPLAILYSVPFAVTAQLAANRGGGQGLCTGVLNIAIVIPQVIIAVGAGPWDELFGKGNIPAFGVASAFALIGGIVGIFLLPKISRRQFRAVSGGGH

SEQ ID NO: 23991 - protein, 523 aa, Triticum aestivum
MARGGGNGEVELSVGVGGGGGGAAGGGEQPAVDISLGRLILAGMVAGGVQYGWALQLSLLTPYVQTLGLSHALTSFMWLCGPIAGLVVQPCVGLYSDKCTSRWGRRRPFILTGCILICIAVVVVGFSADIGAALGDSKEECSLYHGPRWHAAIVYVLGFWLLDFSNNTVQGPARALMADLSAQHGPSAANSIFCSWMALGNILGYSSGSTNNWHKWFPFLRTRACCEACANLKGAFLVAVLFLAFCLVITVIFAKEIPYKAIAPLPTKANGQVEVEPTGPLAVFKGFKNLPPGMPSVLLVTGLTWLSWFPFILYDTDWMGREIYHGDPKGTPDEANAFQAGVRAGAFGLLLNSVVLGFSSFLIEPLCKRLGPRVVWVSSNFLVCLSMAAICIISWWATQDLHGYIQHAITASKEIKIVSLALFAFLGIPLAILYSVPFAVTAQLAAKRGGGQGLCTGVLNIAIVIPQVIIAVGAGPWDELFGKGNIPAFGMASAFALIGGIVGIFLLPKISRRQFRAVSGGGH

SEQ ID NO: 23992 - protein, 522 aa, Triticum aestivum
MARGGGNGEVELSVGVGGGGAGAGGADAPAVDISLGRLILAGMVAGGVQYGWALQLSLLTPYVQTLGLSHALTSFMWLCGPIAGLVVQPCVGLYSDKCTSRWGRRRPFILTGYILICIAVVVVGFSADIGAALGDSKEECSLYHGPRWHAAIVYVLGFWLLDFSNNTVQGPARALMADLSAQHGPSAANSIFCSWMALGNILGYSSGSTNNWHKWFPFLRTRACCEACANLKGAFLVAVLFLAFCLVITVIFAKEIPYKAIAPLPTKANGQVEVEPTGPLAVFKGFKNLPPGMPSVLLVTGLTWLSWFPFILYDTDWMGREIYHGDPKGTPDEANAFQAGVRAGAFGLLLNSVVLGFSSFLIEPLCKRLGPRVVWVSSNFLVCLSMAAICIISWWATQDMHGYIQHAITASKEIKIVSLALFAFLGVPLAILYSVPFAVTAQLAANRGGGQGLCTGVLNIAIVIPQVIIAVGAGPWDELFGKGNIPAFGMASAFALIGGIVGIFLLPKISRRQFRAVSGGGH

SEQ ID NO: 23993 - protein, 522 aa, Triticum aestivum; identical to SEQ ID NO: 23992

SEQ ID NO: 23994 - protein, 524 aa, Triticum aestivum
  unsure (1)..(524): unsure at all Xaa locations
MARGGGNGEVELSVGVGGGGGGAAGGGEQPAVDISLGRLILAGMVAGGVQYGWALQLSLLTPYVQTLGLSHALTSFMWLCGPIAGLVVQPCVGLYSDKCTSRWGRRRPFILTGCILICIAVVVVGFSADIGAALGDSKEECSLYHGPRWHAAIVYVLGFWLLDFSNNTVQGPPRALMADLSAQHGPSAANSIFCSWMALGNILGYSSGSTNNWHKWFPFLRTRACCEACANLKGAFLVAVLFLAFCLVITVIFAKEIPYKAIAPLPTKANGQVEVEPTGPLAVFKGFKNLPPGMPSVLLVTGLTWLSWFPFILYDTDWMGREIYHGDPKGTPDEANAFQAGVRAGAFGLLLNSVVLGFSSFLIEPLCKRLGPRVVWVSSNFLVCLSMAAICIISWWATQDLHGYIQHAITASKEIKIVFLALFAFLGIPXLAILVSGPFAVTAQLAAKRGGGQGLCTGVLNIAIVIPQVIIAVGAGPWDELFGKGNIPAFGMASAFALIGGIVGIFLLPKISRRQFRAVSGGGH

SEQ ID NO: 23995 - protein, 523 aa, Triticum aestivum
  unsure (1)..(523): unsure at all Xaa locations
MERGARNGQVELGVAGGGRSSGGRGGGEVLAGDVSLPRLALAGTAGCGVRSGWAAEPALPTPDVRTLARTYALTDFMWLSGPLAGXMTDPCVGFYSDKRTSRWGGLRPFILTGCILTCILVVVGGFSADIGAVLGDSKEGCSLYHGPPWHILIVYVLGFWLLDFSXTVQGPARARMADGSXLSAQHGPXNSIFCSWMALGNILGYSSGSTNNWHKWFPFLRTRACCEACANLKGAFLVAVLFLAFCLVITVIFAKEIPYKAIAPLPTKANGQVEVEPTGPLAVFKGFKNLPPGMPSVLLVTGLTWLSWFPFILYDTDWMGREIYHGDPKGTPDEANAFQAGVRAGAFGLLLNSVVLGFSSFLIEPLCKRLGPRVVWVSSNFLVCLSMAAICIISWWATQDLHGYIQHAITASKEIKIVSLALFAFLGIPLAILYSVPFAVTAQLAAKRGGGQGLCTGVLNIAIVIPQVIIAVGAGPWDELFGKGNIPAFGMASAFALIGGIVGIFLLPKISRRQFRAVSGGGH

SEQ ID NO: 23996 - protein, 363 aa, Triticum aestivum
  unsure (1)..(363): unsure at all Xaa locations
XTLLQLPLLYASNSATXSPLRSISAGLAENDPRRTRIANAYFSLFMALGNILGYATGAYNGRSRGFPFTITESCSVSCANLKSAFLLDIIILAITTYVSVVTVQDNPTFGSDEAAPPSSHEEEAFLFELFGSFKYFTMPVWMVLIVTSLTWIGWFPFILFDTDWMGREIYRGSPEIVADTQKYHDGVRMGSFGLMLNSVVLGITSIGMEKLCRKWGAGLVWGVSNIIMALCFVAMLIITYVAQNLDYGPSGAPPTGIVAASLIVFTILGAPLSVTYSIPYAMAASRVENLGLGQGLAMGILNLSIVIPQIIVSLGGGPWDQLFGGGNAPSFWVAAAASFVGGLVAILGLPRARLGPKKKTTQR

SEQ ID NO: 23997 - protein, 162 aa, Triticum aestivum
  unsure (1)..(162): unsure at all Xaa locations
DSDEGWYKIFPFTVTPSCSISCANLKSAFLLDIIILVVTTCITVASVQEPQSLGSDEADHPSTEQEAFLWELFGSFRYFTLPVWMVLIVTALTWIGWFPFILFDTDWMGREIYRGSPDDPSITQSYHDGVRMGSFGLMLNSVLLGFTSIVLEKLCRKWGAGX

SEQ ID NO: 23998 - protein, 133 aa, Triticum aestivum
  unsure (1)..(133): unsure at all Xaa locations
MPPRRPNTGGGGGTSSAAPPPPPRKVPLRSLLRAASVACGVQFGWALQLSLLTPYVQELGIPHAFASLVWLCGPLSGLLVQPLVGHLSDRIAPANSPLGRRRPFIAAGAASIAFSVLTVGFSGDLGRLFGDNX

SEQ ID NO: 23999 - protein, 512 aa, Zea mays
  unsure (1)..(512): unsure at all Xaa locations
MEAPSLTKPNDPTKPSNTSSTLSLEGGPGEASPLRKMFAVASIAAGIQFGWALQLSLLTPYVQLLGVPHAAASFIWLCGPISGLVVQPIVGYYSDHCTSRFGRRRPFILGGALAVAIAVFLIGYAADIGHSAGDDITKKTRPRAVGVFVIGFWILDVANNMLQGPCRAFLADLAAGDQQKTRIANGFFSFFMAVGNVLGYAAGSYSGLHKIFPFTETKACDVFCANLKSCFFFSILLLLFLATVALLYVKDKQVEAIPLDDATQPSCFFQLFGALKELKRPMWMLMLVTAVNWVGWFPYFLFDTDWMGREVYGGTAGEXXAYAKGVRVGSLGLMVNAVVLGFMSLAVEPLGKMVGGVKRLWAIVNFILAIGFGMTVVITKVAEHQRRMNPAAVGHPSEGVVVGSMVFFGVLGVPLXITFSVPFALASIYCSASGAGQGLSLGVLNLAIVVPQMVVSALSGPWDSLFGGGNLPAFMVGAAAAALSAIMAIVLLPTPKPADEAKASSMMAGGFH

SEQ ID NO: 24000 - protein, 566 aa, Pneumocystis carinii
MIGLYAHVNASKDHFDDVINASPPLEEPQEPPLRGTLYLLFLTLVLGGLQLTCKSRKIFILYYIREGTPYLLSLGLTKHYTSFVWIAAPLTGIIIQPLIGFFSDRSRSKFGRRRPFLVVGTLCVVISLIGLAYFKDIAFFFFSGHEKVAKNMTIIVSIIIVYLLDFSINIVQASSRALIIDMVPMVQQDLANAWASRMIGIFNVVGYLNGYLNLPKIAPALGNTEFKALSVIGSIVLIVCMAVTFFVAKEKRYFMESLFNFFKTIFSTIITLPSEILWICIIQFFAWIELISMVFKVSDSFLCKIFFGTTYVAEIYAEKYCNKYLKYPDHLYTKEKEYLLIEEATRYGSFAFCAFFYYFFIRNIFLSFIFFMDFWSFYFYFMHAFNHTSKINHFFFPLFVSGKKLFKYIFRLKFYNILQNINIQFLWTFGHFIFTLCMLSTILVKSITQATIIIALCGLSWAITLWAPFSLIAIQLSSNNQLHRSGTILGVHNIFITVPQVLSIIMVGIIFKLTGYKKFEDIIKCNDNMDYSFIWIFQISGISALIAMYLSFKIYTNDPSYERNKI

SEQ ID NO: 24001 - protein, 458 aa, Novosphingobium aromaticivorans
MNGINANRPHLPLARILEMNLGFLGLQFSFGLQQGNMGPIYSYLGADESQLPMLQLAGPITGLLVQPIIGAMSDRTASRWGRRTPYFLIGAVLCAFGLFFMPLSSSILMAMSLLWILDAGNNITMEPYRAYVSDRLNPEQRQAGFLSQSAFTGLAQMLAFLTPSLLVGLGMNQDWVDSHGIPYTVRIVFMIGAVLSLSTILWSVLRVPELPLTPQERAHIQAQPKGAWATLREIGEAIADMPVAMRKLGLMSLFQWVGMSGYWTYAVYSISRTVYGTSDVHSSAFHTAVLTNGEVAAFYNAISFVTAFAMVPLVRRLGPGPLHALCLFAGGVGMFLLPNVTDKALLFLPAIGIGLAWGSIMGNPYAILTNSIPPQRTGVYMGIFNMMIVIPMLIFAVVMSRLDLGFVSLGFDAYKQVLGGDPRNMLMFCGASLVLAGFSVLWVREGRAGAMPQSAVPA

SEQ ID NO: 24002 - protein, 553 aa, Schizosaccharomyces pombe
MSVDENQLENGQLLSSENEASSPFKESIPSRSSLYLIALTVSLLGVQLTWSVELGYGTPYLFSLGLRKEWTSIIWIAGPLTGILIQPIAGILSDRVNSRIGRRRPFMLCASLLGTFSLFLMGWAPDICLFIFSNEVLMKRVTIVLATISIYLLDVAVNVVMASTRSLIVDSVRSDQQHEANSWAGRMIGVGNVLGYLLGYLPLYRIFSFLNFTQLQVFCVLASISLVLTVTITTIFVSERRFPPVEHEKSVAGEIFEFFTTMRQSITALPFTLKRICFVQFFAYFGWFPFLFYITTYVGILYLRHAPKGHEEDWDMATRQGSFALLLFAIISLAANTALPLLLEDTEDDEEDESSDASNNEYNIQERNDLGNIRTGTNTPRLGNLSETTSFRSENEPSRRRLLPSSRSIMTTISSKVQIKGLTLPILWLSSHVLFGVCMLSTIFLQTSWQAQAMVAICGLSWACTLWIPYSLFSSEIGKLGLRESSGKMIGVHNVFISAPQVLSTIIATIVFIQSEGSHRDIADNSIAWVLRIGGISAFLAAYQCRHLLPINF

SEQ ID NO: 24003 - protein, 132 aa, Schizosaccharomyces pombe
YLIALTVSLLGVQLTWSVELGYGTPYLFSLGLRKEWTSIIWIAGPLTGILIQPIAGILSDRVNSRIGRRRPFMLCASLLGTFSLFLMGWAPDICLFIFSNEVLMKRVTIVLATISIYLLDVAVNVVMASTRS

SEQ ID NO: 24004 - protein, 188 aa, Brassica rapa subsp. pekinensis
AGGVQFGWALQLSLLTPYVQELGIPHAWASVIWLCGPLSGLFVQPLVGHSSDRCTSKYGRRRPFIVAGAVAISISVMVIGHAADIGWAFGDREGKIKPRAIVAFVLGFWILDVANNMTQGPCRALLADLTGKVPDFSVDWVKGSKFGILVIIHSHAKHGNAQICDFGYNLGYWSIAIKRSLLCFWSVA

SEQ ID NO: 24005 - protein, 637 aa, Neurospora crassa
MTSSLAEHPDRARPAGNEGHQQQSEQPKSRREEPASRLSTGRRDGASEDTNQQFLVGEQSPLLSPVDNQDGSSSDQGADSADEFQTTKSVWYMILLTISIGGLQIAWSVEMSNGSPYLLSLGISKSLMALVWIAGPLSGTLVQPYVGMMSDNCRIRWGKRKPFMLGGAAATILSLMFLAWTREIVTGILGLFGADPQSESVKLCIICTAVLWIYILDFAINTVQAAIRAFIVDCAPTHQQEMANAMASSLALGTTVLMTCLFIKERDPRLEGPPAKDKPGVVAFFKKIFTSIKRLPPQTKKVCQVQFCAWIGFFPMLFYTSSYIGEIYAEPYLEENPNMTDKELDDLYERATQVGTFALLIFAITSLATNIFLPFFIAPTYDQSMVTAVAPGEAPAVVIKDYEPEQRSWTRHLIIPGFTLRRAWMFSQILFTGCMLCTVFVRTVTAATVLIGLVGITWALTLWAPWAIISAEISQRDEERRSQQQRLSPSRLDNLDGYSSDGNQDSDLGKDDEEAADQAGVILGIHNMAIAAPQIIATVASSIIFRLFQKPRGTPGDHSIAIVLALGGITVLISALFIHRIRDEPTVTYDEISAVEEGDAAPRPNVHSRSRSFDQPPRASLERATLVRNKSFGGMEY

SEQ ID NO: 24006 - protein, 599 aa, Drosophila melanogaster
MVGVTADASQANQLSSVRNPMIKYMLKTRENHAREQDRDYSHVFRRKTRFEMFRLSAIAMAIEFAYAAETSFVSPILLQIGVDHKHMSMTWGLSPLIGFFMSPLLGSISDRCKLRWGRRRPIISILSFGIMCGLILVPYGKDLGLLLGDAGYTYAESALNFTSSSGGSVAALVSGEATTGPSASDYKFAVILTILGMVLLDFDADTCQTPARTYLLDMCVPEEQPKAMTMFALFAGFGGTIGYAIGGVDWETTHIGSFMGGNIPTVFTLVTIIFAVCYLITVTTFREIPLPLIEQDELLRPLSEQAIKKELKKKNNTIYYIQETTQLELQMASDDPKRLEALQGSYQNGYSPAVEKQGKSQDLETQSDYDAPVSLKAYLKSIFIMPYSMRMLALTNLFCWMGHVTYCLYFTDFVGEAVFHGDPTAAPNSEAALNYEAGVRFGCWGMAIYAFSCSIYSLSVTKLMKWFGTKAVYISGMIYYGIGMLVLGLWPTKWGVLVFSTSAGILYGTIFTVPFILVARYHAKNCFSIKNGEIVPLKQARGLGTDVAIISSMVFIAQLIVSLSVGPLVSWMDTTCAVLYASTFLSFLAAIAAMFVLYV

SEQ ID NO: 24007 - protein, 576 aa, Oryzias latipes
MTLLSEDQSARPQPCLLSEPDKHISTSLDQYRPDYTKEDYMDSVETSVFGTVEPPRRSRGRLILHSMVMFGREFCYAVEAAFVTPVLLSVGLPRSLYSLVWLISPILGFLLQPIIGSASDYCRSSWGRRRPYILVLGILMLVGLSMFLNGDAVVSELVSDRSSRSTWAIVVVMFGVVLFDFAADFIDGPIKAYLFDVCSYQDKERGLHYHALFTGLGGACGYLVGAMDWGHSVLGRLLGSEYQVIYFFSALTWGVFLIVHLFSIPEKPLAKVPSESSASSALRLLGPHSNGYGALGKEPVSPVIPTSSPEIRPRSYSALGERPRSFSALGEANSVTSSAKQPIKEDQKKMTFRSLMKAIFNMPNHYRFLCISHLLGWAAFLCNMLFFTDFMGQIVYRGNPYAEHNSTAYITYERGVEVGCWGLCINAVSSALYSYVQRFLLPYIGLKGLYFMGYFVFGMGTSLIGLFPEVIATLILCSVFGVMSSTLYTIPFNLIAEYQREEEEQVKLEGGNESPRGTGMDCAALTCMVQLAQIIVGAGLGALVNAAGSVIVVVLSASSISLIGCIFIALFIRYVE

SEQ ID NO: 24008 - protein, 553 aa, Macaca fascicularis
MVQRLWVSRLLRHRKAQLLLINLLTFGLEVCLAAGITYVPPLLLEVGVEEKFMTMVLGIGPVLGLVSVPLLGSASDHWRGRYGRRRPFIWALSLGILLSLFLIPRAGWLAGLLCPDPRPLELALLILGVGLLDFCGQVCFTPLEALLSDLFRDPDHCRQAYSVYAFMISLGGCLGYLLPAIDWDTSALAPYLGTQEECLFGLLTLIFLTCVAATLLVAEEAALGPAEPAEGLSAPSLPSHCCPCWARLAFRNLGALLPRLHQLCCRMPRTLRRLFVAELCSWMALMTFTLFYTDFVGEGLYQGVPRAELGTEARRHYDEGVRMGSLGLFLQCAISLVFSLVMDRLVQRFGTRAVYLASVAAFPVAAGATCLSHSVAVVTASAALTGFTFSALQILPYTLASLYHRERQVFLPKYRGDAGGTSSEDSLMTSFLPGPKPGAPFPNGHVGAGGSGLLPPPPALCGASACDVSVRVVVGEPTEARVVPGRGICLDLAILDSAFLLSQVAPSLFMGSIVQLSQSVTAYMVSAAGLGLVAIYFATQVVFDKSDLAKYSV

SEQ ID NO: 24009 - protein, 501 aa, Macaca fascicularis
MTMVLGIGPVLGLVSVPLLGSASDHWRGRYGRRRPFIWALSLGILLSLFLIPRAGWLAGLLCPDPRPLELALLILGVGLLDFCGQVCFTPLEALLSDLFRDPDHCRQAYSVYTFMISLGGCLGYLLPAIDWDTSALAPYLGTQEECLFGLLTLIFLTCVAATLLVAEEAALGPAEPAEGLSAPSLPSHCCPCWARLAFRNLGALLPRLHQLCCRMPRTLRRLFVAELCSWMALMTFTLFYTDFVGEGLYQGVPRAELGTEARRHYDEGVRMGSLGLFLQCAISLVFSLVVDRLVQRFGTRAVYLASVAAFPVAAGATCLSHSVAVVTASAALTGFTFSALQILPYTLASLYHRERQVFLPKYRGDAGGTSSEDSLMTSFLPGPKPGAPFPNGHVGAGGSGLLPPPPALCGASACDVSVRVVVGEPTEARVVPGRGICLDLAILDSAFLLSQVAPSLFMGSIVQLSQSVTAYMVSAAGLGLVAIYFATQVVFDKSDLAKYSV

SEQ ID NO: 24010 - protein, 530 aa, Homo sapiens
MGSNSGQAGRHIYKSLADDGPFDSVEPPKRPTSRLIMHSMAMFGREFCYAVEAAYVTPVLLSVGLPSSLYSIVWFLSPILGFLLQPVVGSASDHCRSRWGRRRPYILTLGVMMLVGMALYLNGATVVAALIANPRRKLVWAISVTMIGVVLFDFAADFIDGPIKAYLFDVCSHQDKEKGLHYHALFTGFGGALGYLLGAIDWAHLELGRLLGTEFQVMFFFSALVLTLCFTVHLCSISEAPLTEVAKGIPPQQTPQDPPLSSDGMYEYGSIKKVKNGYVNPELAMQGAKNKNHAEQTRRAMTLKSLLRALVNMPPHYRYLCISHLIGWTAFLSNMLFFTDFMGQIVYRGDPYSAHNSTEFLIYERGVEVGCWGLCINSVFSSLYSYFQKVLVSYIGLKGLYFTGYLLFGLGTGFIGLFPNVYSTLVLCSLFGVMSSTLYTVPFNLITEYHREEEKERQQAPGGDPDNSVRGKGMDCATLTCMVQLAQILVGGGLGFLVNTAGTVVVVVITASAVALIGCCFVALFVRYVD

SEQ ID NO: 24011 - protein, 530 aa, Homo sapiens
MGSNSGQAGRHIYKSLADDGPFDSVEPPKRPTSRLIMHSMAMFGREFCYAVEAAYVTPVLLSVGLPSSLYSIVWFLSPILGFLLQPVVGSASDHCRSRWGRRRPYILTLGVMMLVGMALYLNGATVVAALIANPRRKLVWAISVTMIGVVLFDFAADFIDGPIKAYLFDVCSHQDKEKGLHYHALFTGFGGALGYLLGAIDWAHLELGRLLGTEFQVMFFFSALVLTLCFTVHLCSISEAPLTEVAKGIPPQQTPQDPPLSSDGMYEYGSIEKVKNGYVNPELAMQGAKNKNHAEQTRRAMTLKSLLRALVNMPPHYRYLCISHLIGWTAFLSNMLFFTDFMGQIVYRGDPYSAHNSTEFLIYERGVEVGCWGFCINSVFSSLYSYFQKVLVSYIGLKGLYFTGYLLFGLGTGFIGLFPNVYSTLVLCSLFGVMSSTLYTVPFNLITEYHREEEKERQQAPGGDPDNSVRGKGMDCATLTCMVQLAQILVGGGLGFLVNTAGTVVVVVITASAVALIGCCFVALFVRYVD

SEQ ID NO: 24012 - protein, 553 aa, Homo sapiens
MVQRLWVSRLLRHRKAQLLLVNLLTFGLEVCLAAGITYVPPLLLEVGVEEKFMTMVLGIGPVLGLVCVPLLGSASDHWRGRYGRRRPFIWALSLGILLSLFLIPRAGWLAGLLCPDPRPLELALLILGVGLLDFCGQVCFTPLEALLSDLFRDPDHCRQAYSVYAFMISLGGCLGYLLPAIDWDTSALAPYLGTQEECLFGLLTLIFLTCVAATLLVAEEAALGPTEPAEGLSAPSLSPHCCPCRARLAFRNLGALLPRLHQLCCRMPRTLRRLFVAELCSWMALMTFTLFYTDFVGEGLYQGVPRAEPGTEARRHYDEGVRMGSLGLFLQCAISLVFSLVMDRLVQRFGTRAVYLASVAAFPVAAGATCLSHSVAVVTASAALTGFTFSALQILPYTLASLYHREKQVFLPKYRGDTGGASSEDSLMTSFLPGPKPGAPFPNGHVGAGGSGLLPPPPALCGASACDVSVRVVVGEPTEARVVPGRGICLDLAILDSAFLLSQVAPSLFMGSIVQLSQSVTAYMVSAAGLGLVAIYFATQVVFDKSDLAKYSA

SEQ ID NO: 24013 - protein, 243 aa, Homo sapiens
MGSNSGQAGRHIYKSLADDGPFDSVEPPKRPTSRLIMHSMAMFGREFCYAVEAAYVTPVLLSVGLPSSLYSIVWFLSPILGFLLQPVVGSASDHCRSRWGRRRPYILTLGVMMLVGMALYLNGATVVAALIANPRRKLVWAISVTMIGVVLFDFAADFIDGPIKAYLFDVCSHQDKEKGLHYHALFTDSQGNDIKVTAESTGEHASSLPLPLHQPPHWMDGLPVQHAVLHRFHGPDCVPRGSL

SEQ ID NO: 24014 - protein, 187 aa, Equus caballus
MGGNSGQPGVPTYKSLAEDGPFGSVELPKRSTGRLVMHSMAMFGREFCYAVEAAYVTPVLLSVGLPKRLYSVVWLLSPVLGFLLQPVVGSASDHCRARWGRRRPYILALSVIMLLGMALYLNGDAVISALIADRRKKLTWAITITMIGVVLFDFAADFIDGPIKAYLFDVCSHQDKERGLHHHALFT

SEQ ID NO: 24015 - protein, 521 aa, Anopheles gambiae str. PEST
MYGTYQQQERLTEDDILQGMLESRQRFAKLDNSRGYQHSFRKKSKWELVRLSLLIVGIECTYATETALVAPILLGIGLPHTVMTMIWATPSLAGLLFAPVIASVSDRLRSRWGRRRPVLLALGCTILTGMLVLPNGPAIGELVGLTSVGWVATITTVGLIMSDFSAETSNGLCRTYAMEVCTIRDQARVLSIMVLTGGIGATMGALFGAINWNRLGIGRLLGGNGPSVFAANWIVLFLGLLVTLTSFSEIPLPVQESEPMLRPVTQKMLLDEVKRAQGEGRVQEEKEEVQEVVGFKQFVHNVLHMPRSMKVLCLTQLLSHMSYLTYCLYYTDFVGATVYEGDVRALKGSAAAELYDDGVRFACLGMALCSTTSSIYSVFIEGLIVRFGARPVYVGGLLAHCCGMLAMGLMPHKLVVFGCCALTGVMYATIYSIPFLLISHYHSKNCFTEVDGQYVESIEPRGFGVDVSMMSSMLCLAQLIVSLAIGAVIDAVGSTIIITFISSAFMLCAAGSAMAILYMEL

SEQ ID NO: 24016 - protein, 607 aa, Citrus sinensis
MSETRSFKVPYRNLKKGTAAEVEMIEADEFHHRIDLNSNASSPPSSSHSPIPNGTSNFAVRPKQCSLITLVLSCTVAAGVQFGWALQLSLLTPYIQTLGIQHAFSSFIWLCGPITGLVVQPCVGIWSDKCTSKYGRRRPFILAGCLMISVAVIIIGFSADIGYILGDTKEHCSKFRGTRTRAAFVFVIGFWLLDLANNTVQGPARALLADLSGPDQRNSANAILCSWMAVGNILGFSAGASGSWHRWFPFLTSRACCAACGNLKAAFLVAVVFLTLCALVTIYFADEVPLTVNQPNHLTDSAPLLDDPQRTAISKSKHDMPAAPNANGNKVESGHERDANLKHISKKAEDPNGSFNDGPGAVLVNLLTSLRHLPPAMHVVLVVMALTWLSWFPFFLFDTDWMGREVYHGDPKGNDHEVKFYDQGVREGAFGLLLNSVVLGVSSFLIEPMCRWIGSRLVWAISNFIVFACMATTAIISVISVRRNILEGIEHGIGANQAIKVASLVVFTLLGFPLAITYSVPFAITGELTADSGGGQGLAIGVLNLAIVIPQMIVSLGAGPWDALFGGGNIPAFGLASLSALAGGVVATLKLPHLSSNSFTSSGFHFG

SEQ ID NO: 24017 - protein, 612 aa, Vitis vinifera
MPETMDAPSIRVPYKNLKQAEVELVAADEPRHGADLNSRVPNGTSDPSSSPSSIPHPPKHGGLRTLILSCMIAAGVQFGWALQLSLLTPYIQTLGIEHAFSSFIWLCGPITGLVVQPCVGIWSDKCSSKYGRRRPFILAGSLMISVAVTIIGFSADIGYLLGDTNMDCRKFKGTRTWAAIIFVLGFWMLDLANNTVQGPARALLADLSGPDQRNSANAIFCSWMAVGNILGFSAGASGHWHRWFPFLLNKACCEACGNLKAAFLIAVVFLTLCTLVTLYFAEEVPLMAYQPHHLSDSAPLLDNPQQIGFDNSKSKLDMSAVDNATGNNPESSYEINKNAKHLTPIVQEQNESFSDGPGAVLVNLLTSLRHLPPAMHSVLLVMALSWLSWFPFFLFDTDWMGREVYHGDPKGDESAVKAYDAGVREGAFGLLLNSVDLGISSFLIEPMCQRMGARLVWAMSNFIVFACMAGTAIISLVSVNEYITEGIQHAIGENRAIKIASLVVFALLGFPLSITYSVPFSITAELTADTGGGQGLAIGVLNLAIVIPQMIVSLGAGPWDALFGGGNIPAFVLAALFALAAGVIATLKLPNLSSSSYKSSGFHFGNFPASMR

SEQ ID NO: 24018 - protein, 594 aa, Arabidopsis thaliana
MSDSVSISVPYRNLRKEIELETVTKHRQNESGSSSFSESASPSNHSDSADGESVSKNCSLVTLVLSCTVAAGVQFGWALQLSLLTPYIQTLGISHAFSSFIWLCGPITGLVVQPFVGIWSDKCTSKYGRRRPFILVGSFMISIAVIIIGFSADIGYLLGDSKEHCSTFKGTRTRAAVVFIIGFWLLDLANNTVQGPARALLADLSGPDQRNTANAVFCLWMAIGNILGFSAGASGKWQEWFPFLTSRACCAACGNLKAAFLLAVVFLTICTLVTIYFAKEIPFTSNKPTRIQDSAPLLDDLQSKGLEHSKLNNGTANGIKYERVERDTDEQFGNSENEHQDETYVDGPGSVLVNLLTSLRHLPPAMHSVLIVMALTWLSWFPFFLFDTDWMGREVYHGDPTGDSLHMELYDQGVREGALGLLLNSVVLGISSFLIEPMCQRMGARVVWALSNFTVFACMAGTAVISLMSLSDDKNGIEYIMRGNETTRTAAVIVFALLGFPLAITYSVPFSVTAEVTADSGGGQGLAIGVLNLAIVIPQMIVSLGAGPWDQLFGGGNLPAFVLASVAAFAAGVIALQRLPTLSSSFKSTGFHIG

SEQ ID NO: 24019 - protein, 506 aa, Oryza sativa (japonica cultivar-group); identical to SEQ ID NO: 23982

SEQ ID NO: 24020 - protein, 501 aa, Daucus carota
MAGPEADRNRHRGGATAAPPPRSRVSLRLLLRVASVACGIQFGWALQLSLLTPYVQELGIPHAWSSIIWLCGPLSGLLVQPIVGHMSDQCTSKYGRRRPFIVAGGTAIILAVIIIAHSADIGGLLGDTADNKTMAIVAFVIGFWILDVANNMTQGPCRALLADLTGNDARRTRVANAYFSLFMAIGNVLGYATGAYSGWYKVFPFSLTSSCTINCANLKSAFYIDIIFIIITTYISISAAKERPRISSQDGPQFSEDGTAQSGHIEEAFLWELFGTFRLLPGSVWVILLVTCLNWIGWFPFILFDTDWMGREIYGGEPNQGQSYSDGVRMGAFGLMMNSVVLGITSVLMEKLCRIWGSGFMWGLSNILMTICFFAMLLITFIAKNMDYGTNPPPNGIVISALIVFAILGIPLAITYSVPYALVSTRIESLGLGQGLSMGVLNLAIVVPQVIVSLGSGPWDQLFGGGNSPAFVVAALSAFAAGLIALIAIRRPRVDKSRLHH

SEQ ID NO: 24021 - protein, 604 aa, Lycopersicon esculentum
MDAVSIRVPYKNLKQQEVELTNVDESRFAQLEIRSDSSSPRVSNGEMNDSNLPLPPPPVRNSLLTLILSCTVAAGVQFGWALQLSLLTPYIQTLGIEHAFSSFIWLCGPITGLVVQPCVGIWSDKCHSKYGRRRPFIFIGAVMISIAVIIIGFSADIGYLLGDTKEHCSTFKGTRSRAAIVFVVGFWMLDLANNTVQGPARALLADLSGPDQRNTANAVFCSWMAVGNILGFSAGASGGWHRWFPFLTNRACCEPCGNLKAAFLVAVVFLTLCTLVTLYFANEVPLSPKQYKRMSDSAPLLDSPQNTGFDLSQSKRELQYRNSVANNESEMGHVADNSPKNEEQRPDKDQGDSFADSPGAVLVNLLTSLRHLPPAMHSVLIVMALTWLSWFPFFLFDTDWMGREVYHGDPKGEADEVNAYNQGVREGAFGLLLNSVVLGVSSFLIEPMCKWIGSRLVWAVSNFIVFVCMACTAIISVVSISANTQGVQHVIGATRSTQIAALVVFSLLGIPLAVTYSVPFSITAELTADAGGGQGLAIGVLNLAIVVPQMVVSLGAGPWDALFGGGNIPAFALASLAALAAGIFAMLRLPNLSSNFKSTGFHFG

SEQ ID NO: 24022 - protein, 595 aa, Neurospora crassa
MTDSIPPTDGKTPDNTCAPLEPRQKYSTTQSPFPDFEFPVEQGNPSYQGEKSSDRHCKEEEEGLSPNQWVASGEQEDNSGSYSEAENVEMSTWRGSPSVKGSTETMRMLLLTCVSVGITFTWGVEMTCVVADQSKSRWGRRRPVIVIGSIITALALMALGFTKEIVAYFIWDPTYARACTIAVAVLSLYCVDFAINADTLPIQKQQSGAAWASRMGSLGHIIGYGMGAIDLLQLFGTSLGDTQFKQLTVIAALGMLVTSSVTCWAVTERVLVTVRPDPRRQSGRFKVVRQIVSTLITLPPRIRAICYAVFWSWIGWFPFIIYSSTWVGETYFRYDVPADTRDSSDALGDMGRIGSTALTVYSTVTFISAWILPPFIRAPEDNTFTHRPPASIASLVETVNKYKPELLSAWIASHLMFAFAMFLTPFAASFRFATALVALCGIPWSIAIWAPTTFLGVEVNKLSGAPDPMSPGATSATNPSYRRLSTSSIEMRFVNEPAAGAVEEVTAGNSSTGELSGIYFGILNIYTTIPQFIATFMSSIVFAILEPGKSPELATDAHPSEHAKTDGPNAIAVCMFIGAISSLVAAYATAKMRDI

SEQ ID NO: 24023 - protein, 511 aa, Glycine max
  unsure (1)..(511): unsure at all Xaa locations
MAGGGYVDSGNAKQFEGKVTAFVLVTCFVAAMGGLLFGYDLGITGGVTSMEPFLIKFFPGVYKQMQDDVGHRSQYCKFDNELLTLFTSSLYLAALVASFFASSTTRMMGRKASMFLGGLFFLVGTLMRGNSAXVPMFQKRCRFIDLNIDYXASXEHGGLFFLVGALLNGFAVNIEMIIIWKPMLSANLINYGTSKLENGWRISLGVGAVPAVLLCFGALFLGDTPNSLIERGQKEEARKMLQKIRGIDNVEEELQELVLASESAKEVEHPWKNITTPKYRPQLTFCTLIPFFQQLTGINVVMFYAPVLFKTLGFGNDASLMSSVITGGVNVVATLVSILTVDKVGRKVLFLEGGVQMLICQIATGVMIAMKFGVSGEGSFSSGEANLILFFICAFVAAFAWSWGPLGWLVPSEICPLEVRSAGQAINVAVNMLFTFAIAQVFLVMLCHLKFGLFFFFAAFVLIMTIFIAMLLPETKNIPIEEMHTVWRSHWFWSKIVPHADDDRKPEAAQS

SEQ ID NO: 24024 - protein, 473 aa, Oryza sativa
  unsure (1)..(473): unsure at all Xaa locations
MPGAVIVHHHTRYKTYPGEVTGFVFFCCLIASVGGCIFGYDIGLTAGLTSTESFLAMFFPVIFEQQQERVITNQYCKFDSQVLTLVGSSLFLFAMVAGIFASPMSRAFGRKWTLFVAAVAYLIGAILGAISFNFIVLLTGRLLLGVGVGVCIHASPLYISEMAPAQQRGMLNILFQLMITVGILSASLTTYWTSKIAGGWGWRVGLAFGTVPAAVIALGSLAIPDTPVSLIARGEGEAARATLAKIRGVDDVRAEFEDLTTASEESKAVAHPWRELFFGGRYKPQLAFAXXASLVSSVITGLVNVFSTFVAVMTADKILVGTFIGLQFGVSGTGAMSEQYAMCIVLFVCVYVAGFAWSWGPMGWLIPSEVYPLAVRSAAQSVTVAVNMFFTAFISQIFLTLLCHLRFGLFYFFGAWVLLMTVFIATLLPETKCVPLEEVAHVWRKHWFWRKFIVDSPGGGAEMRKRIALEMSX

SEQ ID NO: 24025 - protein, 489 aa, Oryza sativa
  unsure (1)..(489): unsure at all Xaa locations
MPGAVIVXTTTRGXKTYPGEVTGFVFFCCLIASVGGCIFGYDIGLTAGLTSTESFLAMFFPVIFEQQQERVITNQYCKFDSQVLTLVGSSLFLFAMVAGIFASPMSRAFGRKWTLFVAAVAYLIGAILGAISFNFIVLLTGRLLLGVGVGIGLQASPLYISEMAPAQQRGMLNILFQLMITVGILSASLTTYWTSKIAGGWGWRVGLAFGTVPAAVIALGSLAIPDTPVSLIARGEGEAARATLAKIRGVDDVRAEFEDLTTASEESKAVAHPWRDLLRRQVQXXQLAFATVGFRQDASLVSSVITGLVNVFSTFVAVMTADKVGRRALFLQXILVGTFIGLQFGVSGTGAMSEQYAMCIVLFVCVYVAGFAWSWGPMGWLIPSEVYPLAVRSAAQSVTVAVNMFFTAFISQIFLTLLCHLRFGLFYFFGAWVLLMTVFIATLLPETKCVPLEEVAHVWRKHWFWRKFIVDSPDRGGAEMRKRIALEMS

SEQ ID NO: 24026 - protein, 525 aa, Trypanosoma congolense
MSDAQEGRERAPDTVMVSPDEVHEDNAPRFFSAENLGVVQVQVIGGTLNGFSIGFVAVYLMLYEVSTNCSLAKAGASCEGMKNVKCKWSDDDGCTWANACDSVRDPNVCLDKVGYDALHSGIFASSMIVGSMIGSIVTERFITMFGLKKSFLIVAIIGVVASAMNHIAVGTDEFWVLCPARLLMGLGLGIVCVLCPMYVNENAHSKHRKVDGVMFQVFITFGIMLAALLGLALYYTVDYETNVAMVDRLHGFCAVSSILAVVMFIAGIFLRESKTKFVNEGSGKVEGELDPNEYSWGEMMWPLFMGTMTAGTLQLTGINAVMNYAPKITENLGMDPPLGNFLVMMWNFVTALVAIPLASRFTMRQMFITCSFIASCTCLFLCGIPVFPGVAEESVKNGVATTGIALFIAAFEFGVGSCFFVLAQDLFPPSFRPKGASFVVMMQFVFNILVNLLYPITTEAISGGASGNQDKGQAVSFILFGLIGLVCFVLQYFYLYPYEAKSVEGSPNDPQQRMASPIEVATPRN

SEQ ID NO: 24027 - protein, 525 aa, Trypanosoma congolense
MSDAQEGRERAPDTVMVSPDEVHEDNAPRFFSAENLGVVQVQVIGGTLNGFSIGFVAVYLMLYEVSTNCSLAKAGASCEGMKNVKCKWSDDDGCTWANACDSVRDPNVCLDKVGYDALHSGIFASSMIVGSMIGSIVTERFITMFGLKKSFLIVAIIGVVASAMNHIAVGTDEFWVLCPARLLMGLGLGIVCVLCPMYVNENAHSKHRKVDGVMFQVFITFGIMLAALLGLALYYTVDYETNVAMVDRLHGFCAVSSILAVVMFIAGIFLRESKTKFVNEGSGKVEGELDPNEYSWGEMMWPLFMGTMTAGTLQLTGINAVMNYAPKITENLGMDPPLGNFLVMMWNFVTALVAIPLASRFTMRQMFITCSFIASCTCLFLCGIPVFPGVAEESVKNGVATTGIALFIAAFEFGVGSCFFVLAQDLFPPSFRPKGASFVVMMQFVFNILVNLLYPITTEAISGGASGNQDKGQAVSFILFGLIGLVCFVLQYFYLYPYEAKSVEGSPSDPQQRMASPIEVATPRN

SEQ ID NO: 24028 - protein, 389 aa, Chlamydomonas reinhardtii
MAAMMMRQKVAGAIAGERRSAVAPKMGRAATAPVVVASANASAFKGAAVTARVKASTRAARVQSRRTAVLTQAKIGDSLAEFLVEATPDPKLRHVMMSMAEATRTIAHKVRTASCAGTACVNSFGDEQLAVDMVADKLLFEALKYSHVCKLACSEEVPEPVDMGGEGFCVAFDPLDGSSIVDTNFAVGTIFGVWPGDKLTNITGREQVAAGMGIYGPRTVFCIALKDAPGCHEFLLMDDGKWMHVKETTHIGGQDVRPRQPARHLRQPRLRAPDQLLPGREVHPALHRRHRARLVPDHCQGEGCVHQLDLAHHQGQAPHPVRGCSPGPAGIEKAGGASSCDGKAVSALDIPILVCDQRTQICYGSIGEVRRFEEYMYGTSPRFSEKVVA

SEQ ID NO: 24029 - protein, 181 aa, Glycine max
MGGPVEGGFSVAFDPLDGSSIVDTNFTVGTIFGVWPGDKLTGITGRDQVAAAMGVLGPRTTYVLALKDFPGTHEFLLLDEGKWQHVKETTEIGEGKLFSPGNLRATSDNPDYAKVAPLGFLIEKAGGYSSDGHQSVLDKVISNIDDRTQVAYGSKNEIIRFEETLYGKSRLKGGVAVGAAA

SEQ ID NO: 24030 - protein, 128 aa, Glycine max
  unsure (1)..(128): unsure at all Xaa locations
METVAAAGYARGAATRSPACCAAMSFSQSYRPKAARPATSFYGESLRANTARTSFPAGRQSKAASRAALTTRCAIGDSLEEFLTKATPDKNLIRLLICMGEAMRTIAFKVRTASCGGTACVNSFGDEX

SEQ ID NO: 24031 - protein, 106 aa, Glycine max
  unsure (1)..(106): unsure at all Xaa locations
MQQTGGFIXAPSLIIVKXKGIFTNVSSPSAKAKLRLLFEVAPLGFLIEKAGGYSSDGHQSVLDKVISNIDDRTQVAYGSKNEIIRFEETLYGKSRLKGGVAVGAAA

SEQ ID NO: 24032 - protein, 185 aa, Glycine max
  unsure (1)..(185): unsure at all Xaa locations
METNIACYTRGPFLPRIIPKHSSTLXISPSFGLRSLNSSSLFGESLXVASKSPLKVSKTKITSLVTRCEIGDSLEEFLTQATPHMGLIRLLVSMGXALRTISFKVKTASWGXGTQCVNTFGDEQLAVDSLANQLLCEAFRYSHFCGCACSEENAVLLDMGRHSRCVWCVSCNPLDGSRIVFSHFA

SEQ ID NO: 24033 - protein, 162 aa, Triticum aestivum
  unsure (1)..(162): unsure at all Xaa locations
XPLGEGKMFSPGNLRAPFDNPDXAQLVPSYXKEKYPLRYPPGMVPYVPPILVKEKGIFPNVTSPTAQAKLRLLFQVAPLGFFIKKAGGPNNDGKQSVLDKVISVLDERTQVAYGSKNEIIPFEETLYGSSRLAPSPPVGPPPPKSIPLLFLPLFPPEKPNAP

SEQ ID NO: 24034 - protein, 100 aa, Triticum aestivum
METVAAAGYARGADTRSPACCAAMSFSQSYRPKAARPATTFYGESLRANTARTSFPAGRQYKAASQAALTILYAGGDRAEENLTNATSIKVPVRQLYSVV

SEQ ID NO: 24035 - protein, 68 aa, Zea mays
  unsure (1)..(68): unsure at all Xaa locations
XGDSLEEFLTKATPDKNLIRLLICMGDARGTIAVKVRAASCGESACVKSFGDEQLAVDRRANRLLFEA

SEQ ID NO: 24036 - protein, 358 aa, Neurospora crassa
MTTSHSLKAAAPPATPLTAALTTHLASLLPSSSRDSLRTSVLPSLLTSIAATSTALRAAQDVSLAGSSNSFGDDQLNVDVLAEEAIRLCLAQCPSVVTASSEEDPIEKPVQHTGLPFQVVEAEQDRTHGEVYTVAFDPLDGSSIIAPNWTVGTIFSLWDGTSALGASPRDKQIGAVLGVYGPRTTAVVALRFPGEEKGVCFEVGLSDSSEAGKGQEWDLIRPSVSYAPPPFKTRYFAPANLRSTNTHAAYAKLVAHYMAENYTLRYCGGLVPDVVHALVKGHGVYLSPVTETSKAKLRSLYELFPLALVVECCGGRAVDPVSGENILGDKGVEGCDERGGIVCGTAEEVEYAKEVLCG

SEQ ID NO: 24037 - protein, 38 aa, Mus musculus
DGSAPYGARYVGSMVADIHRTLVYGGIFLYPANKKSPS

SEQ ID NO: 24038 - protein, 54 aa, Sparus aurata
GTIFGIYKKTTDGEPCEKDALQPGRNIVAAGYALYGSATMMVLSTGQGVNCFML

SEQ ID NO: 24039 - protein, 123 aa, Oryza sativa
  unsure (1)..(123): unsure at all Xaa locations
XLLXNPVNXMQNCYEKYEMXYLDGIFYDXQIIVKEKGIFTNVTSPTAKAKLRLLFEVAPLGFLIEKAGGYSSDGKQSVLDKVINNLDERTQVAYGSKNEIIRFEETLYGSSRLTAGATVGAAA

SEQ ID NO: 24040 - protein, 67 aa, Oryza sativa
  unsure (1)..(67): unsure at all Xaa locations
LFLLKXDAKWPHVKDTTTIGEGKMFSPGYLRATFDNPEYDKLINYYVKEKYTLRYTGGMVPRVNHIX

SEQ ID NO: 24041 - protein, 110 aa, Oryza sativa
  unsure (1)..(110): unsure at all Xaa locations
LDRPAIETAAGDRYTRGGGTRSTACCADRSMXRSNYRPKAWRPSSTFYGKSWRVNTGRCAACGRHCKEASRTGLAPEXEIWDSMEEFLTKETPDNNLIRLLISMGEAMRX

SEQ ID NO: 24042 - protein, 102 aa, Oryza sativa
  unsure (1)..(102): unsure at all Xaa locations
PQQKNQXXRPAXETXAAASNTRGAATRPPAXSAAKXXXQXNRPKAXRPPSTXNGEXXRXNTARXXPXGRQXKAASRAARSTRXENGDSXEEXQTKATPEKNX

SEQ ID NO: 24043 - protein, 98 aa, Oryza sativa
  unsure (1)..(98): unsure at all Xaa locations
XPRVRGVDAVRVDGGVQGGAVRRGGEGLCKSDTRRIQNGKMFYTGNLRATFDNCEYDKFINYYVMEKFTLRYIGGKVFGDNHIKNEEIGIFTNVTCTT

SEQ ID NO: 24044 - protein, 524 aa, Mesocricetus auratus
MSSIYGLLNFMSATELLLAITVFCLGFWVVRALRTQVPKGLKTPPGPWGLPILGHVLTLGKNPHLSLTKLSKQYGDVLQIRIGSTPVVVLSGLDTIRQALVRQGDDFKGRPDFYSFTLITNGKSMTFNPDCGPVWAARRRLAQDALKSFSIALDPASASSCYLEEYVIKEADYLISKFQKLMAEVGHFDPDRYLVVSVTNVICAMCFGQRYDHDDQELLSIVNLSNEFGKVTGSGYPPDFIPILRYLPNSSLDAFKDLNKKFYSFMQKSVKEHYRTFEKGHIRDITDSLIEHCQDKSLDENANVQLSDDRVINIIVDLFGAGFDTVTTAISWSLMYLVTNPGVQRKIQEELDTVIGRSRRPRLCDRSQLPYLEAFILETFRHSSFLPFTIPHSTTRDTSLCGFYIPKGHCVFVNQWQINHNQELWGDPNKFRPERFLTSSGTLDKVLSGKVTLFGLGKRKCIGETIGRLEVFLFLAILLQQIEFTVSPGEKVDMTPIYGLTLKHARCEYFQAQTRSSGPQHPQA

SEQ ID NO: 24045 - protein, 524 aa, Mesocricetus auratus
MSSIYGLLNFMSATELLVAITVFCLGFWVVRALRTQVPKGLKTPPGPWGLPILGHVLTLGKNPHLSLTKLSKQYGDVLQIRIGSTPVVVLSGLDTIRQALVRQGDDFKGRPDFYSFTLITNGKSMTFNPDCGPVWAARRRLAQDALKSFSIALDPASASSCYLEEYVIKEADYLISKFQKLMAEVGHFDPDRYLVVSVTNVICAMCFGQRYDHDDQELLSIVNLSNEFGKVTGSGYPPDFIPILRYLPNSSLDAFKDLNKKFYSFMQKSVKEHYRTFEKGHIRDITDSLIEHCQDKSLDENANVQLSDDRVINIIVDLFGAGFDTVTTAISWSLMYLVTNPGVQRKIQEELDTVIGRSRRPRLCDRSQLPYLEAFILETFRHSSFLPFTIPHSTTRDTSLCGFYIPKGHCVFVNQWQINHNQELWGDPNKFRPERFLTSSGTLDKVLSGKVTLFGLGKRKCIGETIGRLEVFLFLAILLQQIEFTVSPGEKVDMTPIYGLTLKHARCEYFQAQTRSSGPQYPQA

SEQ ID NO: 24046 - protein, 521 aa, Mus musculus
MYGLPAFVSATELLLAVTVFCLGFWVVRATRTWVPKGLKTPPGPWGLPFIGHMLTVGKNPHLSLTRLSQQYGDVLQIRIGSTPVVVLSGLNTIKQALVRQGDDFKGRPDLYSFTLITNGKSMTFNPDSGPVWAARRRLAQNALKSFSIASDPTSASSCYLEEHVSKEANYLVSKLQKVMAEVGHFDPYKYLVVSVANVICAICFGQRYDHDDQELLSIVNLSNEFGEVTGSGYPADFIPVLRYLPNSSLDAFKDLNDKFYSFMKKLIKEHYRTFEKGHIRDITDSLIEHCQDRKLDENANVQLSDDKVITIVLDLFGAGFDTVTTAISWSLMYLVTNPRVQRKIQEELDTVIGRDRQPRLSDRPQLPYLEAFILETFRHSSFVPFTIPHSTTRDTSLNGFYIPKGCCVFVNQWQVNHDRELWGDPNEFRPERFLTPSGTLDKRLSEKVTLFGLGKRKCIGETIGRSEVFLFLAILLQQIEFKVSPGEKVDMTPTYGLTLKHARCEHFQVQMRSSGPQHLQA

SEQ ID NO: 24047 - protein, 524 aa, Mus musculus
MPSMYGLPAFVSATELLLAVTVFCLGFWVVRATRTWVPKGLKTPPGPWGLPFIGHMLTVGKNPHLSLTRLSQQYGDVLQIRIGSTPVVVLSGLNTIKQALVRQGDDFKGRPDLYSFTLITNGKSMTFNPDSGPVWAARRRLAQNALKSFSIASDPTSASSCYLEEHVSKEANYLVSKLQKVMAEVGHFDPYKYLVVSVANVICAICFGQRYDHDDQELLSIVNLSNEFGEVTGSGYPADFIPVLRYLPNSSLDAFKDLNDKFYSFMKKLIKEHYRTFEKGHIRDITDSLIEHCQDRKLDENANVQLSDDKVITIVLDLFGAGFDTVTTAISWSLMYLVTNPRVQRKIQEELDTVIGRDRQPRLSDRPQLPYLEAFILETFRHSSFVPFTIPHSTTRDTSLNGFYIPKGCCVFVNQWQVNHDRELWGDPNEFRPERFLTPSGTLDKRLSEKVTLFGLGKRKCIGETIGRSEVFLFLAILLQQIEFKVSPGEKVDMTPTYGLTLKHARCEHFQVQMRSSGPQHLQA

SEQ ID NO: 24048 - protein, 501 aa, Mus musculus
MIMFLSSLVTTFWEALHLKTLVLAVVTFLFLINILRSRHPKNYPPGPWRLPFVGNFFQIDTKQTHLVLQQFVKKYGNVFSLELGQSPVVVVSGLPLIKEMFTHLDQNFVNRFMTPVRERITGKNGLVVSNGQTWKEQRRLALMALRNFGLGKKSLEERIQEETHHLVEAIREEGGQPFNPHLKLINAVSNIICSVTFGERFDYEDCQFQELLQLLDETMHLMGSSAGQLYNGFPCIMKYLPGPHQKIFRNWGKLKLFVSHIVKKHEKDWNPDEPRDFIDAFLIEMQKDPDRTTSFNEENLISTTLDLFLGGTETTSSTLRWALLYMSSYPEIQENVQAEIDRVIGHKRQVSLSDRESMPYTNAVIHEVQRMGNIVPLNSSREVTVDTKFNGFHLPKGTMILTNLTALHRDPKEWATPEVFNPEHFLENGQFKKRESFLPFSMGKRACLGEQLAKSELFIFFSALMQKFTFKPPINEKLSLKFRMGLILSPASYRICAIPRV

SEQ ID NO: 24049 - protein, 524 aa, Rattus norvegicus
MPSVYGFPAFTSATELLLAVTTFCLGFWVVRVTRTWVPKGLKSPPGPWGLPFIGHVLTLGKNPHLSLTKLSQQYGDVLQIRIGSTPVVVLSGLNTIKQALVKQGDDFKGRPDLYSFTLIANGQSMTFNPDSGPLWAARRRLAQNALKSFSIASDPTLASSCYLEEHVSKEAEYLISKFQKLMAEVGHFDPFKYLVVSVANVICAICFGRRYDHDDQELLSIVNLSNEFGEVTGSGYPADFIPILRYLPNSSLDAFKDLNKKFYSFMKKLIKEHYRTFEKGHIRDITDSLIEHCQDRRLDENANVQLSDDKVITIVFDLFGAGFDTITTAISWSLMYLVTNPRIQRKIQEELDTVIGRDRQPRLSDRPQLPYLEAFILETFRHSSFVPFTIPHSTIRDTSLNGFYIPKGHCVFVNQWQVNHDQELWGDPNEFRPERFLTSSGTLDKHLSEKVILFGLGKRKCIGETIGRLEVFLFLAILLQQMEFNVSPGEKVDMTPAYGLTLKHARCEHFQVQMRSSGPQHLQA

SEQ ID NO: 24050 - protein, 524 aa, Rattus norvegicus
MPSVYGFPAFTSATELLLAVTTFCLGFWVVRVTRTWVPKGLKSPPGPWGLPFMGHVLTLGKNPHLSLTKLSQQYGDVLQIRIGSTPVVVLSGLNTIKQALVKQGDDFKGRPDLYSFTLIANGQSMTFNPDSGPLWAARRRLAQNALKSFSIASDPTLASSCYLEEHVSKEAEYLISKFQKLMAEVGHFDPFKYLVVSVANVICAICFGRRYDHDDQELLSIVNLSNEFGEVTGSGYPADFIPILRYLPNSSLDAFKDLNKKFYSFMKKLIKEHYRTFEKGHIRDITDSLIEHCQDRRLDENANVQLSDDKVITIVFDLFGAGFDTITTAISWSLMYLVTNPRIQRKIQEELDTVIGRDRQPRLSDRPQLPYLEAFILETFRHSSFVPFTIPHSTIRDTSLNGFYIPKGHCVFVNQWQVNHDQELWGDPNEFRPERFLTSSGTLDKHLSEKVILFGLGKRKCIGETIGRLEVFLFLAILLQQMEFNVSPGEKVDMTPAYGLTLKHARCEHFQVQMRSSGPQHLQA

SEQ ID NO: 24051 - protein, 524 aa, Rattus norvegicus
MPSVYGFPAFTSATELLLAVTTFCLGFWVVRVTRTWVPKGLKSPPGPWGLPFIGHVLTLGKNPHLSLTKLSQQYGDVLQIRIGSTPVVVLSGLNTIKQALVKQGDDFKGRPDLYSFTLIANGQSMTFNPDSGPLWAARRRLAQNALKSFSIASDPTLASSCYLEEHVSKEAEYLISKFQKLMAEVGHFDPFKYLVVSVANVICAICFGRRYDHDDQELLSIVNLSNEFGEVTGSGYPADFIPILRYLPNSSLDAFKDLNKKFYSFMKKLIKEHYRTFEKGHIRDITDSLIEHCQDRRLDENANVQLSDDKVITIVFDLFGAGFDTITTAISWSLMYLVTNPRIQRKIQEELDTVIGRDRQPRLSDRPQLPYLEAFILETFRHSSFVPFTIPHSTIRDTSLNGFYIPKGHCVFVNQWQVNHDQELWGDPNEFRPERFLTSSGTLDKHLSEKVILFGLGKRKCIGETIGRLEVFLFLAILLQQMEFNVSPGEKVDSTPAYGLTLKHARCEHFQVQMRSSGPQHLQA

SEQ ID NO: 24052 - protein, 507 aa, Rattus norvegicus
MWELVGLLLLILAYFFWVKSKTPGAKLPRSLPSLPLVGSLPFLPRRGHMHVNFFKLQEKYGPIYSLRLGTTTTVIIGHYQLAREVLIKKGKEFSGRPQMVTQSLLSDQGKGVAFADAGSSWHLHRKLVFSTFSLFKDGQKLEKLICQEAKSLCDMMLAHDKESIDLSTPIFMSVTNIICAICFNISYEKNDPKLTAIKTFTEGIVDATGDRNLVDIFPWLTIFPNKGLEVIKGYAKVRNEVLTGIFEKCREKFDSQSISSLTDILIQAKMNSDNNNSCEGRDPDVFSDRHILATVGDIFGAGIETTTTVLKWILAFLVHNPEVKKKIQKEIDQYVGFSRTPTFNDRSHLLMLEATIREVLRIRPVAPMLIPHKANVDSSIGEFTVPKDTHVVVNLWALHHDENEWDQPDQFMPERFLDPTGSHLITPTQSYLPFGAGPRSCIGEALARQELFVFTALLLQRFDLDVSDDKQLPRLEGDPKVVFLIDPFKVKITVRQAWMDAQAEVST

SEQ ID NO: 24053 - protein, 516 aa, Cavia porcellus
MSTSAMELLLTATIFCLVLWVVRIFRPQVPKGLKSPPGPWGWPLIGHMLTLGKNPHLALTRLSARYGDVLQIRIGSTPVVVLSGLDTIRQALVRQGDDFKGRPDLYSFTFISDGQSMTFNPDSGPVWAARRRLAQSALKSFSVASDPASVSSCYLEEHVKKEAEYLIKKFQELMAGPGHFDPYRYVVVSVANVISAICFGQRYSHDDQQLLELIDLNNEFGEVTGSGNPSDFIPILRYLPSATMDTFKDLNRRFSVFIQKMIKEHYKTFEKGHIRDITDSLIEHCQDRKLDKNANIQISDQKIIGIVLDLFGAGFDTITTAISWSLLYLVMNPRIQKKIQEELDTVIGRERQPQLADRPKLPYMEAFISEVFRYSSFMPFTIPHSTTKDTSLNGFYIPKGCCIFVNQWQINHDQKLWGDPSVFRPERFLSPDGTVDKALSEKVTIFGLGKRRCLGEVIGRWEVFLFLAILLQQLEFSTSPGVKIDMTPIYGLTMKYSRCEHFQAQTRPFVLKCPEA

SEQ ID NO: 24054 - protein, 522 aa, Vigna radiata
MLLELALGLLVLALFLHLRPTPTAKSKALRHLPNPPSPKPRLPFIGHLHLLKDKLLHYALIDLSKKHGPLFSLYFGSMPTVVASTPELFKLFLQTHEATSFNTRFQTSAIRRLTYDSSVAMVPFGPYWKFVRKLIMNDLLNATTVNKLRPLRTQQIRKFLRVMAQGAEAQKPLDLTEELLKWTNSTISMMMLGEAEEIRDIAREVLKIFGEYSLTDFIWPLKHLKVGKYEKRIDDILNKFDPVVERVIKKRREIVRRRKNGEVVEGEVSGVFLDTLLEFAEDETMEIKITKDHIKGLVVDFFSAGTDSTAVATEWALAELINNPKVLEKAREEAYSVVGKDRLVDEVDTQNLPYIRAIVKETFRMHPPLPVVKRKCTEECEINGYVIPEGALILFNVWQVGRDPKYWDRPSEFRPERFLETGAEGEARPLDLRGQHFQLLPFGSGRRMCPGVNLATSGMATLLASLIQCFDLQVLGPQGQILKGGDAKVSMEERAGLTVPRAHSLVCVPLARIGVASKLLSK

SEQ ID NO: 24055 - protein, 521 aa, Vigna radiata
MLLELALGLLVLALFLHLRPTPTAKSKALRHLPNPPSPKPRLPFIGHLHLLKDKLLHYALIDLSKKHGPLFSLYFGSMPTVVASTPELFKLFLQTHEATSFNTRFQTSAIRRLTYDSSVAMVPFGPYWKFVRKLIMNDLLNATTVNKLRPLRTQQIRKFLRAMAQGAEAQKPLDLTEELLKWTNSTISMMMLGEAEEIRDIAREVLKIFGEYSLTDFIWPLKHLKVGKYEKRIDDILNKFDPVVERVIKKRREIVRRRKNGEVVEGEVSGVFLDTLLEFAEDETMEIKITKDHIKGLVVDFFSAGTDSTAVATEWALAELINNPKVLEKAREEVYSVVGKDRLVDEVDTQNLPYIRAIVKETFRMHPPLPVVKRKCTEECEINGYVIPEGALILFNVWQVGRDPKYWDRPSEFRPERFLETGAEGEARPLDLRGQHFQLLPFGSGRRMCPGVNLATSGMATLLASLIQCFDLQVLGPQGQILKGGDAKVSMEERAGLTVPRAHSLVCVPLARIGVASKLLS

SEQ ID NO: 24056 - protein, 521 aa, Vigna radiata
MLLELALGLLVLALFLHLRPTPTAKSKALRHLPNPPSPKPRLPFIGHLHLLKDKLLHYALIDLSKKHGPLFSLYFGSMPTVVASTPELFKLFLQTHEATSFNTRFQTSAIRRLTYDSSVAMVPFGPYWKFVRKLIMNDLLNATTVNKLRPLRTQQIRKFLRVMAQGAEAQKPLDLTEELLKWTNSTISMMMLGEAEEIRDIAREVLKIFGEYSLTDFIWPLKHLKVGKYEKRIDDILNKFDPVVERVIKKRREIVRRRKNGEVVEGEVSGVFLDTLLEFAEDETMEIKITKDHIKGLVVDFFSAGTDSTAEATEWALAELINNPKVLEKAREEVYSVVGKDRLVDEVDTQNLPYIRAIVKETFRMHPPLPVVKRKCTEECEINGYVIPEGALILFNVWQVGRDPKYWDRPSEFRPERFLETGAEGEARPLDLRGQHFQLLPFGSGRRMCPGVNLATSGMATLLASLIQCFDLQVLGPQGQILKGGDAKVSMEERAGLTVPRAHSLVCVPLARIGVASKLLS

SEQ ID NO: 24057 - protein, 521 aa, Vigna radiata
MLLELALGLLVLALFLHLRPTPTAKSKALRHLPNPPSPKPRLPFIGHLHLLKDKLLHYALIDLSKKHGPLFSLYFGSMPTVVASTPELFKLFLQTHEATSFNTRFQTSAIRRLTYDSSVAMVPFGPYWKFVRKLIMNDLLNATTVNKLRPLRTQQIRKFLRVMAQGAEAQKPLDLTEELLKWTNSTISMMMLGEAEEIRDIAREVLKIFGEYSLTDFIWPLKHLKVGKYEKRIDDILNKFDPVVERVIKKRREIVRRRKNGEVVEGEVSGVFLDTLLEFAEDETTEIKITKDHIKGLVVDFFSAGTDSTAVATEWALAELINNPKVLEKAREEVYSVVGKDRLVDEVDTQNLPYIRAIVKETFRMHPPLPVVKRKCTEECEINGYVIPEGALILFNVWQVGRDPKYWDRPSEFRPERFLETGAEGEARPLDLRGQHFQLLPFGSGRRMCPGVNLATSGMATLLASLIQCFDLQVLGPQGQILKGGDAKVSMEERAGLTVPRAHSLVCVPLARIGVASKLLS

SEQ ID NO: 24058 - protein, 506 aa, Pyrus communis
MSPPEIAILILVFLTFLWSLLRLINVSSRQSRTLPPGPAALPIIGNLHMLGDLPHRSLQNLAKKYGPIMSMRLGSVPTIVVSSPKTAKLFLKTHDTIFASRPKLQASEYMAYGTKAMAFTEYGPYWRHIRKLCTLQLLCPSKIESFAPLRREEVGLLVQSLKVAAEAGEVVDFSEKVGELVEGITYRMVLGRKNDDMFDLKGIIEEALFLTGAFNISDYVPFLSPLDLQGLTKRMKRVSKTVDQLFEKIIQDHEQVSRSEQGNHHKDFVDVLLSSIHQTLKPNDEEVYMLERTNAKATLLDMIAGAFDTSATAIIWTLAELLRHPKVMKRLQEELQSVIGMDRMVEESDLPKLDYLSMVVKESFRLHPVAPLLVPHQSMEDITVDGYHTPKKSRIFINIWTIGRDPKSWDNAEEFYPERFMNRNVDLRGHDFQLIPFGSGRRGCPAMQLGLTTVRLALGNLLHCSNWELPSGMLPKDLDMTEKFGLSLSKAKHLLATPTCRLYNES

SEQ ID NO: 24059 - protein, 505 aa, Zinnia elegans
MDLLLVEKTLLALFAAIIASIFISKLRGKRFKLPPGPVPVPIFGNWLQVGDDLNHRNLTDLAKKFGEIFLLRMGQRNLVVVSSPNLAKEVLHTQGVEFGSRTRNVVFDIFTGKGQDMVFTVYGEHWRKMRRIMTVPFFTNKVVQQYRTGWEAEAAAVVDDVKKNPKAATEGVVIRKRLQLMMYNNMFRIMFDRRFESEDDPLFVKLKMLNGERSRLAQSFEYNYGDFIPILRPFLKGYLKLCKEVKEKRFQLFKDYFVDERKKLGSTKSMDNNQLKCAIDHILDAKDKGEINEDNVLYIVENINVAAIETTLWSIEWAIAELVNHPEIQAKLRHELVSQLGPGVQVTEPDLHKLPYLQAVIKETLRLRMAIPLLVPHMNLHDAKLGGYDIPAESKILVNAWWLANNPDQWKKPEEFRPERFLEEESKVEANGNDFRYLPFGVGRRSCPGIILALPILGITIGRLVQNFELLPPPGQDKVDTTEKGGQFSLHILKHSTIVAKPRVL

SEQ ID NO: 24060 - protein, 454 aa, Populus sieboldii x Populus grandidentata
DLNHRNLTDLAKKFGDILLLRMGQRNLVVVSSPDLAKEVLHTQGVEFGSRTRNVVFDIFTGKGQDMVFTVYGEHWRKMRRIMTVPFFTNKVVQQYRHGWEEEAAQVVEDVKKNPEAATHGIVLRRRLQLMMYNNMYRIMFDRRFESEEDPLFNKLKALNGERSRLAQSFDYNYGDFIPILRPFLRGYLKICKEVKERRLQLFKDYFVEERKKLGSTKSMSNEGLKCAIDHILDAQKKGEINEDNVLYIVENINVAAIETTLWSIEWGIAELVNHPEIQKKLRDELDTVLGPGHQITEPDTYKLPYLNAVIKETLRLRMAIPLLVPHMNLHDAKLGGFDIPAESKILVNAWWLANNPAKWKNPEEFRPERFFEEEAKVEANGNDFRYLPFGVGRRSCPGIILALPILGITLGRLVQNFELLPPPGQSKIDTSEKGGQFSLHILKHSTIVAKPRSF

SEQ ID NO: 24061 - protein, 505 aa, Populus tremuloides
MDLLLLEKTLLGSFVAILVAILVSKLRGKRFKLPPGPLPVPVFGNWLQVGDDLNHRNLTDLAKKFGDILLLRMGQRNLVVVSSPELSKEVLHTQGVEFGSRTRNVVFDIFTGKGQDMVFTVYGEHWRKMRRIMTVPFFTNKVVQQYRYGWEEEAAQVVEDVKKNPGAATHGIVLRRRLQLMMYNNMYRIMFDRRFESEEDPLFNKLKALNGERSRLAQSFDYNYGDFIPILRPFLRGYLKICQEVKERRLQLFKDYFVDERKKLASTKNMCNEGLKCAIDHILDAQKKGEINEDNVLYIVENINVAAIETTLWSIEWGIAELVNHPEIQKKLRHELDTLLGPGHQITEPDTYKLPYLNAVVKETLRLRMAIPLLVPHMNLHDAKLGGFDIPAESKILVNAWWLANNPAHWKNPEEFRPERFLEEEAKVEANGNDFRYLPFGVGRRSCPGIILALPILGITLGRLVQNFELLPPPGQSKIDTSEKGGQFSLHILKHSTIVAKPRSF

SEQ ID NO: 24062 - protein, 513 aa, Populus balsamifera subsp. trichocarpa
MDSLLQSLQTLPMSFFLIIISSIFFLGLISRLRRRSPYPPGPKGFPLIGSMHLMDQLTDRGLAKLAKQYGGLFHMRMGYLHMVAGSSPEVARQVLQVQDNMFSNRPANIAISYLTYDRADMAFAHYGPFWRQMRKLCVMKLFSRKRAESWESVRDEVDSMVKTVESNIGKPVNVGELIFTLTMNITYRAAFGAKNEGQDEFIKILQEFSKLFGAFNISDFIPWLGWIDPQGLTARLVKARKALDKFIDHIIDDHIQKRKQNNYSEEAETDMVDDMLTFYSEETKVNESDDLQNAIKLTRDNIKAIIMDVMFGGTETVASAIEWAMAELLKSPEDIKRVQQELADVVGLERRVEESDFDKLTFFKCTLKETLRLHPPIPLLLHETSEDAEVAGYYVPKKTRVMINAYAIGRDKNSWEDPDSFKPSRFLEPGVPDFKGNHFEFIPFGSGRRSCPGMQLGLYALDLAVAHLLHCFTWELPDGMKPSELDMTDMFGLTAPRATRLVAVPRKRVVCPL

SEQ ID NO: 24063 - protein, 505 aa, Populus balsamifera subsp. trichocarpa X Populus deltoides
MDLLLLEKTLLGSFVAILVAILVSKLRGKRFKLPPGPIPVPVFGNWLQVGDDLNHRNLTDLAKKFGDIFLLRMGQRNLVVVSSPDLSKEVLHTQGVEFGSRTRNVVFDIFTGKGQDMVFTVYGEHWRKMRRIMTVPFFTNKVVQQYRYGWEEEAAQVVEDVKKNPEAATNGIVLRRRLQLMMYNNMYRIMFDRRFESEDDPLFNKLKALNGERSRLAQSFDYNYGDFIPILRPFLRGYLKICQEVKERRLQLFKDYFVDERKKLASTKNMSNEGLKCAIDHILDAQKKGEINEDNVLYIVENINVAAIETTLWSIEWGIAELVNHPEIQKKLRHELDTLLGPGHQITEPDTYKLPYLNAVIKETLRLRMAIPLLVPHMNLHDAKLGGFDIPAESKILVNAWWLANNPAHWKNPEEFRPERFLEEEAKVEANGNDFRYLPFGVGRRSCPGIILALPILGITLGRLVQNFELLPPPGQSKIDTAEKGGQFSLHILKHSTIVAKPRSF

SEQ ID NO: 24064 - protein, 520 aa, Brassica napus
MESSISQTLSQVIDPTTGILIVVSLFIFIGLITRRRRPPYPPGPRGWPIIGNMSMMDQLTHRGLANLAKKYGGLCHLRMGFLHMYAVSSPDVAKQVLQVQDSVFSNRPATIAISYLTYDRADMAFAHYGPFWRQMRKVCVMKVFSRKRAESWASVRDEVDKMIRSVSSNVGKSINVGEQIFALTRNITYRAAFGSACEKGQDEFIRILQEFSKLFGAFNVADFIPYFGWIDPQGINKRLVKARNDLDGFIDDIIDEHMKKKENQNSVDAGDVVDTDMVDDLLAFYSEEAKLVSETADLQNSIKLTRDNIKAIIMDVMFGGTETVASAIEWALTELLRSPEDLNRVQQELAEVVGLDRRVEESDIEKLTFLKCTLKETLRLHPPIPLLLHETAEDTEIDGYFVPKKSRVMINAFAIGRDKNSWVDPETFRPSRFLEPGVPDFKGSNFEFIPFGSGRRSCPGMQLGLYALELAVAHILHCFTWKLPDGMKPSELDMSDVFGLTAPKATRLYAVPSTRLICSV

SEQ ID NO: 24065 - protein, 520 aa, Brassica napus
MESSISQTLSQVLDPTTGILIVVSLFIFIGLITRRRRPPYPPGPRGWPIIGNMSMMDQLTHRGLANLAKKYGGLCHLRMGFLHMYAVSSPDVAKQVLQVQDSVFSNRPATIAISYLTYDRADMAFAHYGPFWRQMRKVCVMKVFSRKRAESWASVRDEVDKMIRSVSSNVGKSINVGEQIFALTRNITYRAAFGSACEKGQDEFIRILQEFSKLFGAFNVADFIPYFGWIDPQGINKRLVKARNDLDGFIDDIIDEHIKKKENQNSVDAGDVVDTDMVDDLLAFYSEEAKLVSETADLQNSIKLTRDNIKAIIMDVMFGGTETVASAIEWALTELLRSPEDLKRVQQELAEVVGLDRRVEESDIEKLTFLKCTLNETLRLHPPIPLLLHETAEDTEIDGYFVPKKSRVMINAFAIGRDKNSWVDPETFRPSRFLEPGVPDFKGSNFEFIPFGSGRRSCPGMQLGLYALELAVAHILHCFTWKLPDGMKPSELDMSDVFGLTAPKATRLYAVPCTRLICSV

SEQ ID NO: 24066 - protein, 506 aa, Ruta graveolens
MDLLLLEKALLGLFAAAVVAIAVSKLRGKRFKLPPGPLGFPVFGNWLQVGDDLNQRKLANLSKKFGDVYLLRMGQRNLVVVSSPEMAKEVLHTQGVEFGSRTRNVVFDIFTGKGQDMVFTVYSEHWRKMRRIMTVPFFTNKVVQQQRFNWEDEAARVVEDVKKDPQAATTGIVLRRRLQLLMYNNMYRIMFDRRFESVDDPLFNKLKALNGERSRLAQSFEYNYGDFIPILRPFLRGYLKLVKEVKERRLKLFKDYFVEERKKLTSTKSMTEENFKCAIDHVLDAQQKGEINEDNVLYIVENINVAAIETTLWSIEWGIAELVNHPDIQKKLRAEIDRVLGPDHQITEPDTHKLPYLQAVIKETLRLRMAIPLLVPHMNLNDAKLAGYDIPAESKILVNAWWLANNPAHWKDPQVFRPERFLEEESGVEANGNDFRYIPFGVGRRSCPGIILALPILGITIGRMVQNFELLPPPGQSKIDTSEKGGQFSLFILNHSTIVLKPRSSV

SEQ ID NO: 24067 - protein, 506 aa, Ruta graveolens
MDLLLLEKALLGLFAAAVVAIAVSKLRGKRFKLPPGPFGFPVFGNWLQVGDDLNQRKLANLSKKFGDVYLLRMGQRNLVVVSSPEMAKEVLHTQGVEFGSRTRNVVFDIFTGKGQDMVFTVYSEHWRKMRRIMTVPFFTNKVVQQQRFNWEDEAARVVEDVKKDPQAATTGIVLRRRLQLLMYNNMYRIMFDRRFESVDDPLFNKLKALNGERSRLAQSFEYNYGDFIPILRPFLRGYLKLVKEVKERRLKLFKDYFVEERKKLTSTKSMTEENFKCAIDHVLDAQQKGEINEDNVLYIVENINVAAIETTLWSIEWGIAELVNHPDIQKKLRAEIDRVLGPDHQITEPDTHKLPYLQAVIKETLRLRMAIPLLVPHMNLNDAKLAGYDIPAESKILVNAWWLANNPAHWKDPQVFRPERFLEEESGVEANGNDFRYIPFGVGRRSCPGIILALPILGITIGRMVQNFELLPPPGQSKIDTSEKGGQFSLFILNHSTIVLKPRSSV

SEQ ID NO: 24068 - protein, 505 aa, Citrus x paradisi
MDLLLLEKTLLALFAAVVVAITVSKLRGKRFKLPPGPLPVPVFGNWLQVGDDLNHRNLSDLAKKYGDVLLLRMGQRNLVVVSSPDHAKEVLHTQGVEFGSRTRNVVFDIFTGKGQDMVFTVYGEHWRKMRRIMTVPFFTNKVVQQQRFNWEDEAARVVEDVKKDPEAATNGIVLRRRLQLMMYNNMYRIMFDRRFESQDDPLFNRLKALNGERSRLAQSFEYNYGDFIPILRPFLRGYLKICKEVKERRLQLFKDYFVEERKKLASTKSMSNESLKCAIDHILDAQTKGEINEDNVLYIVENINVAAIETTLWSIEWGIAELVNHPEIQKKLRNELDTVLGPGHQITEPDTHKLPYLQAVIKETLRLRMAIPLLVPHMNLHDAKLGGYDVPAESKILVNAWWLANNPAQWKKPEEFRPERFLEEESKVEANGNDFRYLPFGVGRRSCPGIILALPILGITIGRLVQNFELLPPPGQSKIDTAEKGGQFSLHILKHSTIVAKPRSF

SEQ ID NO: 24069 - protein, 525 aa, Cicer arietinum
MRLVEIAVTLVLIALFIHFRPTPTAKSKALRHLPNPPSPKPRLPFVGHLHLLDHPLLHQSLIRLGERYGPLYSLYFGSMPTIVASTPDLFKLFLQTHEAVSFNTRFQTSAIRRLTYDNSVAMVPFAPYWKFIRKLIMNDLLNATTVNKLRPLRSQEIRKVLNVMAKSAQTQEPLNVTEELLKWTNSTISRMMLGEAEEIRDIARDVLKIFGEYSLTDFIWPLKKLKVGKYEKKIEEIFNRFDPVIEKVIKKRQDVRRRRKERNGELEEGEQSVVFLDTLLDFAEDETMEIKITKEQIKGLVVDFFSAGTDSTAVATDWCLSELINNPRVMKKAREEVDSVVGKDRLVDESDIQNLPYIRAVVKETFRMHPPLPVVKRKCTEECEINGYVIPEGALVLFNVWAVGRDPKYWDRPLEFRPERFLENAGEGDAGSIDLRGQHFQLLPFGSGRRMCPGVNLATAGMATLLSSVLQCFELQVAGPNGQILKGADAKVSMDERPGLTVPRAHNLVCVPLARPGAAAKLLSS

SEQ ID NO: 24070 - protein, 500 aa, Lens culinaris
FLHLRPTPTAKSKALRHLPNPPSPKPRLPFIGHLHLLKDKLLHYALIDLSKKHGPLFSLYFGSMPTVVASTPELFKLFLQTHEATSFNTRFQTSAIRRLTYDSSVAMVPFGPYWKFVRKLIMNDLLNATTVNKLRPLRTQQIRKFLRVMAQGAEAQKPLDLTEELLKWTNSTISMMVLGEAEEIRDIAREVLKIFGEYSLTDFIWPLKHLKVGKYEKRIDDILNKFDPVVERVIKKRREIVRRRKNGEVVEGEVSGVFLDTLLEFAEDETMEIKITKDHIKGLVVDFFSAGTDSTAVATEWALAELINNPKVLEKAREEVYSVVGKDRLVDEVDTQNLPYIRAIVKETFRMHPPLPVVKRKCTEECEINGCVTPEGALILFNVWQVGRDPKYWDRPSEFRPERFLETGAEGEARPLDLRGRHFQLLPFGSGRRMCPGVNLATSGMATLLASLIQCFDLQVLGPQGQILKGGDAKVSMEERAGLTVPRAHSLVCVPLARIG

SEQ ID NO: 24071 - protein, 500 aa, Lens culinaris
FLHLRPTPTAKSKALRHLPNPPSPKPRLPFIGHPHLLKDKLLHYALIDLSKKHGPLFSLYFGSMPTVVASTPELFKLFLQTHEATSFNTRFQTSAIRRLTYDSSVAMVPFGPYWKFVRKLIMNDLLNATTVNKLRPLRTQQIRKFLRVMAQSAEAQKPLDVTEELLKWTNSTISMMMLGEAEEIRDIAREVLKIFGEYSLTDFIWPLKYLKVGKYEKRIDDILNKFDPVVERVIKKRREIVRRRKNGEVVEGEASGVFLDTLLEFAEDETMEIKITKEQIKGLVVDFFSAGTDSTAVATEWALAELINNPRVLQKAREEVYSVVGKDILVDEVDTQNLPYIRAIVKETFRMHPPLPVVKRKCTEECEINGHVIPEGALVLFNVWQVGRDPKYWDRPSEFRPERFLETGAEGEAGPLDLRGQHFQLLPFGSGRRMCPGVNLATSGMATLLASLIQCFDLQVLGPQGQILKGDDAKVSMEERAGLTVPRAHSLVCVPLARIG

SEQ ID NO: 24072 - protein, 523 aa, Medicago truncatula
MLVELAVTLLVIALFIHLRPTPTAKSKALRHLPNPPSPKPRLPFIGHLHLLDNPLLHHTLIKLGKRYGPLYTLYFGSMPTVVASTPDLFKLFLQTHEATSFNTRFQTSAISRLTYDNSVAMVPFAPYWKFIRKLIMNDLLNATTVNKLRPLRSREILKVLKVMANSAETQQPLDVTEELLKWTNSTISTMMLGEAEEVRDIARDVLKIFGEYSVTNFIWPLNKFKFGNYDKRTEEIFNKYDPIIEKVIKKRQEIVNKRKNGEIVEGEQNVVFLDTLLEFAQDETMEIKITKEQIKGLVVDFFSAGTDSTAVATEWTLAELINNPRVWKKAQEEIDSVVGKDRLVDESDVQNLPYIRAMVKEVFRLHPPLPVVKRKCTEECEINGYVIPEGALILFNVWQVGRDPKYWEKPLEFRPERFLENASQGEGEAASIDLRGQHFTLLPFGSGRRMCPGVNLATAGMATLLSSIIQCFDLQVPGPHGQILKGDDVKVSMDERPGLTVPRAHNLMCVPLARAGVAAKLLS

SEQ ID NO: 24073 - protein, 521 aa, Pisum sativum
MLLELALGLFVLALFLHLRPTPSAKSKALRHLPNPPSPKPRLPFIGHLHLLKDKLLHYALIDLSKKHGPLFSLSFGSMPTVVASTPELFKLFLQAHEATSFSTRFQTSAVRRLTYDNSVAMVPFGPYWKFVRKLIMNDLLNATTVNELRPLRTQQIRKFLRVMAQSAEAQKPLDVTEELLKWTNSTISMMMLGEAEEIRDIAREVLKIFGEYSLTDFIWPLKYLKVGKYEKRIDDILNKFDPVVERVIKKRREIVRRRKNGEVVEGEASGVFLDTLLEFAEDETMEIKITKEQIKGLVVDFFSAGTDSTAVATEWALAELINNPRVLQKAREEVYSVVGKDRLVDEVDTQNLPYIRAIVKETFRMHPPLPVVKRKCTEECEINGYVIPEGALVLFNVWQVGKDPKYWDRPSEFRPERFLETGAEGEAGPLDLRGQHFQLLPFGSGRRMCPGVNLATSGMATLLASLIQCFDLQVLGPQGQILKGDDAKVSMEERAGLTVPRAHSLVCVPLARIGVASKLLS

SEQ ID NO: 24074 - protein, 521 aa, Pueraria montana var. lobata
MLLELALGLLVLALFLHLRPTPTAKSKALRHLPNPPSPKPRLPFIGHLHLLKDQLLHHALIDLSKKYGPLYSLYFGSMPTVVASTPELFKLFLQTHEATSFNTRFQTSAIRRLTYDNSVAMVPFGPYWKFIRKLIMNDLLNATTVNKLRPLRTEQIRKFLRVMAQSAEAQQPLNVTEELLKWTNSTISMMMLGEAEEIRDIAREVLKIFGEYSVTNFIWPLMYLKVGKYEKRIDDIFNKFDPVIERVIKKRREIVRRRKNGEVVEGEASGVFLDTLLEFAEDETMEIKITKEQIKGLVVDFFSAGTDSTAVATEWALAELINNPRVLQKARDEVYSVVGKDRLVDEVDTQNLPYIRAIVKETFRMHPPLPVVKRKCVEECEVNGFVIPEGALILFNVWAVGRDPKYWDRPLEFRPERFLESGAEGEVGPIDLRGQHFQLLPFGSGRRMCPGVNLATSGMATLLASLIQCFDLQVVGPKGEILKGNDAKVSMEESAGLTVPRAHNLRCVPLARTSVAAKLLS

SEQ ID NO: 24075 - protein, 505 aa, Vigna radiata var. radiata
MDLLLLEKTLLGLFLAAVVAIVVSKLRGKRFKLPPGPLPVPIFGNWLQVGDDLNHRNLTQLAKRFGDIFLLRMGQRNLVVVSSPDLAKEVLHTQGVEFGSRTRNVVFDIFTGEGQDMVFTVYGEHWRKMRRIMTVPFFTNKVVQQYRHGWEAEAAAVVDDVRKNPDAAVSGLVIRRRLQLMMYNNMYRIMFDRRFESEEDPLFQRLKALNGERSRLAQSFEYNYGDFIPILRPFLKGYLKICKEVKETRLKLFKDYFVDERKNIGSTKSTNNEGLKCAIDHILDAEKKGEINEDNVLYIVENINVAAIETTLWSIEWGIAELVNHPEIQQKVRDEIDRVLGVGHQVTEPDIQKLPYLQAVVKETLRLRMAIPLLVPHMNLHDAKLGGYDIPAESKILVNAWWLANNPAHWKKPEEFRPERFFEEESHVEANGNDFRYLPFGVGRRSCPGIILALPILGITLGRLVQNFELLPPPGQSQIDTSEKGGQFSLHILKHSTVVAKPRSF

SEQ ID NO: 24076 - protein, 535 aa, Oryza sativa (japonica cultivar-group)
MEVAAMEISTSLLLTTVALSVIVCYALVFSRAGKARAPLPLPPGPRGWPVLGNLPQLGGKTHQTLHEMTKVYGPLIRLRFGSSDVVVAGSAPVAAQFLRTHDANFSSRPRNSGGEHMAYNGRDVVFGPYGPRWRAMRKICAVNLFSARALDDLRAFREREAVLMVRSLAEASAAPGSSSPAAVVLGKEVNVCTTNALSRAAVGRRVFAAGAGEGAREFKEIVLEVMEVGGVLNVGDFVPALRWLDPQGVVARMKKLHRRFDDMMNAIIAERRAGSLLKPTDSREEGKDLLGLLLAMVQEQEWLAAGEDDRITDTEIKALILNLFVAGTDTTSTIVEWTMAELIRHPDILKHAQEELDVVVGRDRLLSESDLSHLTFFHAIIKETFRLHPSTPLSLPRMASEECEIAGYRIPKGAELLVNVWGIARDPAIWPDPLEYKPSRFLPGGTHTDVDVKGNDFGLIPFGAGRRICAGLSWGLRMVTMTAATLVHAFDWQLPADQTPDKLNMDEAFTLLLQRAEPLVVHPVPRLLPSAYNIA

SEQ ID NO: 24077 - protein, 526 aa, Oryza sativa (japonica cultivar-group)
MDVVPLPLLLGSLAVSAAVWYLVYFLRGGSGGDAARKRRPLPPGPRGWPVLGNLPQLGDKPHHTMCALARQYGPLFRLRFGCAEVVVAASAPVAAQFLRGHDANFSNRPPNSGAEHVAYNYQDLVFAPYGARWRALRKLCALHLFSAKALDDLRAVREGEVALMVRNLARQQAASVALGQEANVCATNTLARATIGHRVFAVDGGEGAREFKEMVVELMQLAGVFNVGDFVPALRWLDPQGVVAKMKRLHRRYDNMMNGFINERKAGAQPDGVAAGEHGNDLLSVLLARMQEEQKLDGDGEKITETDIKALLLNLFTAGTDTTSSTVEWALAELIRHPDVLKEAQHELDTVVGRGRLVSESDLPRLPYLTAVIKETFRLHPSTPLSLPREAAEECEVDGYRIPKGATLLVNVWAIARDPTQWPDPLQYQPSRFLPGRMHADVDVKGADFGLIPFGAGRRICAGLSWGLRMVTLMTATLVHGFDWTLANGATPDKLNMEEAYGLTLQRAVPLMVQPVPRLLPSAYGV

SEQ ID NO: 24078 - protein, 511 aa, Pelargonium x hortorum
MYNMSLYLLLGSSALAFAAYLVLFSFSKSRRRLPPGPKAWPIVGNLPHMGSMPHQNLAAMARTYGPLVYLRLGFVDVVVALSASMASQFLKTHDSNFSSRPPNAGAKHIAYNYHDLVFAPYGPRWRLFRKITSIHLFSGKALDDYRHVRQEEVGVLASNLARAVSTIVNLGQLLNICATNALGRAVIGKKVFKDGTDDVDPKADEFKSMVVELMVLAGVFNIGDFIPPLDCLDLQGVASKMKNLHKRFDAFLSAILQEHNINSAASATPSMLTTLISLKDSVEDSEGGKLTDTEIKALLLNMFTAGTDTTSSTVEWAIAELIRQPEILIRAQKEIDSVVGRDRLVTELDLSKLPYLQAIVKETFRLHSSTPLSLPRIATQSCEINGYHIPKGATLLVNVWAIARDPDVWADPLSFRPERFLPGSEKENVDVKGNDFELIPFGAGRRICAGMSLGLRMVQLLTATLLHAFNWDLPQGQIPQELNMDEAYGLTLQRASPLHVRPRPRLPSHLY

SEQ ID NO: 24079 - protein, 505 aa, Solanum melongena
MDVPCPWYSLLIPLFVFIFLLIHHCFFTTSKKQNMLLLPSPRKLPIIGNLHQLGSLPHRSLHKLSQKYGPVMLLHFGSKPVIVASSVDAARDIMKTHDVVWASRPKSSIVDRLSYGSKDVGFSPFGEYWRRAKSITVLHLLSNTRVQSYRNVRAEETANMIGKIRQGCDSSVINLGEHLCSLTNNIISRVALGRTYDEKESGIEHIIEQFVELLGIFNVGDYIPRLEWVNKFTGLDAKVKKVAKELDMFLEIVIEEHIIRKKKEEYTSTGEAKDFVDVLLEIQNGNETDFPLQRDSLKAILLDSFAAGTDTTFATLDWTMAELLRQPRALKTLQDEVRGLAQGKSEITEDDLKNMQYLRAVIKESLRLHPTQESLLVPRESMEDVNLLGYYHIPARTQAIINAWAIGRDPLSWENPEEYQPERFLNSDADVKGLNFKLLPFGAGRRGCPGSSFAIAVIELALARLVHKFDFALPEGIKPEDLDMTETIGITTRRKLPLLVVATPC

SEQ ID NO: 24080 - protein, 507 aa, Solanum melongena
MDVPCLWYSLLILLLLFIFLLIHHCFTTSKTQNMFLPPSPRKLPIIGNLHQLGSHPHRSLRKLSQKYGPVMLLHLGSKPVIVASSVDAARDILKTHDHVWATRPKYSIADSLLYGSKDVGFSPFGEYWWQVRSIVVLHLLSNKRVQSYRDVREEETANMIEKIRQGCDASVINLGEHLCFLTNNITSRVALGRTYDERESGIDAKDILEQFLQLLDTFNVGDYIPWLKWVNKITGLDTKVEKIAKKLDTFLDSVIEEHIIRNKKEEYAITDEAKDFVDVLLEIQNGKETDFPLQRDSLKAILLDAFAAGTDTIYTNLDWTMADVLRQPRAMKTLQNEVRGLAQGKSEITEDDLKNMQYLRAVIKESLRLHPPNSLLVPRESMEDVKLLGYYHIPARTQALINVWAIGRDPLSWENPEEFCPERFLNNDIDMKGLKFELLPFGSGRRGCPGSSFAIAVIELALARLVHKFNFALPKGTKPEDLDMTECTGIATRRKSPLPVVATPFSG

SEQ ID NO: 24081 - protein, 507 aa, Solenostemon scutellarioides
MTSLLAHPLLPPPRRRPLPPLLPPPVSHPAGPRPGRWWRNLYDVKPVRFRCFAEWAQLFGPTFSVWFGSTLNVIVSSSELAKEVLKEKDGQLADPPRSRSAVKLSRDGKDLIWADYGPHYVKVRKVCTVVLFSPKRLELLRPIREDEITVMVESIYQDSAASGKSVVIKKYLASMAFHNITRLVFGKRFVNSEGEVDKQGQEFKAIAINGLKLGASLAVSEHIPWLRWMFPLDEDAFTQHGVRMERLTREIMQEHTLARQKTGGAKQHFFDALLTLKDEYDLSEDTIIALLWDMIAAGMDTPAISVEWAMAELVRNPRVQEKVQEELDRVIGHERIMTELDIPNLPYLQCVVKESLRLHPPTPVMLPHRSNADVKIGGYDIPKGSNVHVNVWAIARDPKSWKVPLEFRPERFLEEDVDIKGHDFRLLRFGAGRRVCPGAQLGIDLATSMIGHLLHHFRWTPPTGVRAEDIDMGENPGTVTYMRTPVEAVPTPRLPANLYKRVAVVDI

SEQ ID NO: 24082 - protein, 490 aa, Helianthus tuberosus
MDFLIIVSTLLLSYILIWVLGVGKPKNLPPGPTRLPIIGNLHLLGALPHQSLAKLAKIHGPIMSLQLGQITTLVISSATAAEEVLKKQDLAFSTRNVPDAVRAYNHERHSISFLHVCTEWRTLRRIVSSNIFSNSSLEAKQHLRSKKVEELIAYCRKAALSNENVHIGRAAFRTSLNLLSNTIFSKDLTDPYEDSGKEFREVITNIMVDSAKTNLVDVFPVLKKIDPQGIKRGMARHFSKVLGIFDQLIEERMRTGRFEQGDVLDVCLKMMQDNPNEFNHTNIKALFLDLFVAGTDTTSITIEWAMTELLRKPHIMSKAKEELEKVIGKGSIVKEDDVLRLPYLSCIVKEVLRLHPPSPLLLPRKVVTQVELSGYTIPAGTLVFVNAWAIGRDPTVWDDSLEFKPQRFLESRLDVRGHDFDLIPFGAGRRICPGIPLATRMVPIMLGSLLNNFDWKIDTKVPYDVLDMTEKNGTTISKAKPLCVVPIPLN

SEQ ID NO: 24083 - protein, 477 aa, Helianthus tuberosus
HEWVLGVGKPKNLPPGPTRLPIIGNLHLLGALPHQSLAKLAKIHGPIMSLQLGQITTLVISSATAAEEVLKKQDLAFSTRNVPDAVRAYNHERHSISFLHVCTEWRTLRRIVSSNIFSNSSLEAKQHLRSKKVEELIAYCRKAALSNENVHIGRAAFRTSLNLLSNTIFSKDLTDPYEDSASGKEFREVITNIMVDSAKTNLVDVFPVLKRIDPQGIKRGMARHFSKVLGIFDQLIEERMRTGRFEQGDVLDVCLKMMQDNPNEFNHTNIKALFLDLFVAGTDTTSITIEWAMTELLRKPHIMSKAKEELEKVIGKGSIVKEDDVLRLPYLSCIVKEVLRLHPPSPLLLPRKVVTQVELSGYTIPAGTLVFVNAWAIGRDPTVWDDSLEFKPQRFLESRLDVRGHDFDLIPFGAGRRICPGIPLATRMVPIMLGSLLNNFDWKIDTKVPYDVLDMTEKNGTTISKAKPLCVVPIPLN

SEQ ID NO: 24084 - protein, 518 aa, Oryza sativa
  unsure (1)..(518): unsure at all Xaa locations
MEEGVVGGGGAAVLVALLVTVVLAVMRSAGSRSSKRGRLPPSPMALPIIGHLHLIRPPPHRAFDRILARHGPLVYLRLGPSTHCVVIGSADVARDFLKFEASIPERPPTAVTRQLAYGKAGFAFAPYGAYWRFVKRLCMSELLGPRTVELLRPVRAAELADVLRAAQSAAERGEGVDMSHELVRMANNSIMRMVASALPXXEMAEAARDCAKQVAELVGAFNAEDFVAVCRGWDLQGIGRRTNEVHARFDALLETIIEAKEEARRRSLRLGRRESSSKDLLDMLMDAAEDDTAEVKLTRDNIKAFVLDIFTAGSDTTATTVEWMLAELVNHPECMAKLRGELDAVVGRSRLVGEQDVARLPYLQAVLKETLRLRPPAVFAQRVTVEPVQVRGYTIPTDTQVFFNIFSIGRDATYWDQPLHFRPDRFLPDGAGAIDPKGQHPQLMPFGSGRRACPGMGLAMQAVPAFLAALVQCFDWAPPPSQPLPLDMEEAAGLVSARKHPLLLLPTPRIQPLPSFYS

SEQ ID NO: 24085 - protein, 498 aa, Oryza sativa
  unsure (1)..(498): unsure at all Xaa locations
LALALVVVVVVHVAVNAFGRRRLPPSPASLPVIGHLHLLRPPVHRTFHELAARLGPLMHVRLGSTHCVVASSAEVAAELIRSHEAKISERPLTAVARQXXAYESAGFAFAPYSPHWRFMKRLCMSELLGPRTVEQLRPVRRAGLVSLLRHVLSQPEAEAVDLTRELIRMSNTSIIRMAASTVPSSVTEEAQELVKVVAELVGAFNADDYIALCRGWDLQGLGRRAADVHKRFDALLEEMIRHKEEARMRKXXTDTDVGSKDLLDILLDKAEDGAAEVKLTRDNIKAFIIDVVTAGSDTSAAMVEWMVAELMNHPEALRKVREEIEAVVGRDRIAGEGDLPRLPYLQAAYKETLRLRPAAPIAHRQSTEEIQIRGFRVPAQTAVFINVWAIGRDPAYWEEPLEFRPERFLAGGGGEGVEPRGQHFQFMPFGSGRRGCPGMGLALQSVPAVVAALLQCFDWQCMDNKLIDMEEADGLVCARKHRLLLHAHPRLHPFPPLL

SEQ ID NO: 24086 - protein, 531 aa, Sorghum bicolor
MATTATPQLLGGSVPQQWQTCLLVLLPVLLVSYYLLTSRSRNRSRSGKLGGAPRLPPGPAQLPILGNLHLLGPLPHKNLRELARRYGPVMQLRLGTVPTVVVSSAEAAREVLKVHDVDCCSRPASPGPKRLSYDLKNVGFAPYGEYWREMRKLFALELLSMRRVKAACYAREQEMDRLVADLDRAAASKASIVLNDHVFALTDGIIGTVAFGNIYASKQFAHKERFQHVLDDAMDMMASFSAEDFFPNAAGRLADRLSGFLARRERIFNELDVFFEKVIDQHMDPARPVPDNGGDLVDVLINLCKEHDGTLRFTRDHVKAIVLDTFIGAIDTSSVTILWAMSELMRKPQVLRKAQAEVRAAVGDDKPRVNSEDAAKIPYLKMVVKETLRLHPPATLLVPRETMRDTTICGYDVPANTRVFVNAWAIGRDPASWPAPDEFNPDRFVGSDVDYYGSHFELIPFGAGRRICPGLTMGETNVTFTLANLLYCYDWALPGAMKPEDVSMEETGALTFHRKTPLVVVPTKYKNRRAA

SEQ ID NO: 24087 - protein, 534 aa, Zea mays
  unsure (1)..(534): unsure at all Xaa locations
MEEQQPRPRPSIMFVLSSLAKNNPESVLALIAVLTVVALRHLISSWRQQARLPPSPTSLPVIGHLHLLRPPVHRTFQELASRIGPLMHIRLGSTHCVVASTPXEVASELIRGHEGSISERXGFTAVARQFAYDSAGFAFAPYNTHWRFMKRLCMSELLGPRTVEQLRPVRRAGXTVSLLADLLASSARGETVDLTRHLIRLSNTSIIRMVASTVPGSVTDEAQEVVKDVAELVGAFNVDDYISLVRGWDLQGLRRRAAGVHRRFDALLEDILRHKEEARASKQDKKQATHSKDLLDILMDKADDPAAEIKLTRENIKAFIIDVVTAGSDTSAAMVEWMLAELMNHPETLRKVAEEIDAVVGGDRIASEADLPQLPYLMAAYKETLRLHPAAPIAHRQSSEEMVVRGFTVPPQTAVFINVWAIGRDPAYWEEPLAFRPERFMPGGAAESLEPRGQHFQYMPFGSGRRGCPGMGLALQSVPAVLAALVQCFHWATVDGDGGVNKIDMSESDGLVCARKKPLLLRPTPRLTPFPAVV

SEQ ID NO: 24088 - protein, 523 aa, Glycyrrhiza echinata
MLVELAITLLVIALFIHLRPTLSAKSKSLRHLPNPPSPKPRLPFVGHLHLLDKPLLHYSLIDLSKRYGPLYSLYFGSMPTVVASTPELFKLFLQTHEASSFNTRFQTSAIRRLTYDNSVAMVPFGPYWKFIRKLIMNDLLNATTVNKLRPLRSQEIRKVLRVMAQSAESQVPLNVTEELLKWTNSTISRMMLGEAEEIRDIARDVLKIFGEYSLTDFIWPLKKLKVGQYEKRIDDIFNRFDPVIERVIKKRQEIRKKRKERNGEIEEGEQSVVFLDTLLDFAEDETMEIKITKEQIKGLVVDFFSAGTDSTAVATDWALSELINNPRVFQKAREEIDAVVGKDRLVDEADVQNLPYIRSIVKETFRMHPPLPVVKRKCVQECEVDGYVIPEGALILFNVWAVGRDPKYWDRPTEFRPERFLENVGEGDQAVDLRGQHFQLLPFGSGRRMCPGVNLATAGMATLLASVIQCFDLSVVGPQGKILKGNDAKVSMEERAGLTVPRAHNLICVPVARSSAVPKLFSS

SEQ ID NO: 24089 - protein, 523 aa, Glycyrrhiza echinata
MEPQLVAVSVLVSALICYFFFRPYFHRYGKNLPPSPFFRLPIIGHMHMLGPLLHQSFHNLSHRYGPLFSLNFGSVLCVVASTPHFAKQLLQTNELAFNCRIESTAVKKLTYESSLAFAPYGDYWRFIKKLSMNELLGSRSINNFQHLRAQETHQLLRLLSNRARAFEAVNITEELLKLTNNVISIMMVGEAEEARDVVRDVTEIFGEFNVSDFIWLFKKMDLQGFGKRIEDLFQRFDTLVERIISKREQTRKDRRRNGKKGEQGSGDGIRDFLDILLDCTEDENSEIKIQRVHIKALIMDFFTAGTDTTAISTEWALVELVKKPSVLQKVREEIDNVVGKDRLVEESDCPNLPYLQAILKETFRLHPPVPMVTRRCVAECTVENYVIPEDSLLFVNVWSIGRNPKFWDNPLEFRPERFLKLEGDSSGVVDVRGSHFQLLPFGSGRRMCPGVSLAMQEVPALLGAIIQCFDFHVVGPKGEILKGDDIVINVDERPGLTAPRAHNLVCVPVDRTSGGGPLKIIEC

SEQ ID NO: 24090 - protein, 523 aa, Glycyrrhiza echinata
MEPQLVAVSVLVSALICYFFFRPYFHRYGKNLPPSPFFRLPIIGHMHMLGPLLHQSFHNLSHRYGPLFSLNFGSVLCVVASTPHFAKQLLQTNELAFNCRIESTAVKKLTYESSLAFAPYGDYWRFIKKLSMNELLGSRSINNFQHLRAQETHQLLRLLSNRARAFEAVNITEELLKLTNNVISIMMVGEAEEARDVVRDVTEIFGEFNVSDFIWLFKKMDLQGFGKRIEDLFQRFDTLVERIISKREQTRKDRRRNGKKGEQESGDGIRDFLDILLDCTEDENSEIKIQRVHIKALIMDFFTAGTDTTAISTEWALVELVKKPSVLQKVREEIDNVVGKDRLVEESDCPNLPYLQAILKETFRLHPPVPMVTRRCVAECTVENYVIPEDSLLFVNVWSIGRNPKFWDNPLEFCPERFLKLEGDSSGVVDVRGSHFQLLPFGSGRRMCPGVSLAMQEVPALLGAIIQCFDFQVVGPKGEILKGDDIVINVDERPGLTAPRAHNLVCVPVERRSGGGPLKIIEC

SEQ ID NO: 24091 - protein, 501 aa, Asparagus officinalis
MTVSITAAVQLFLLLLLLLQLLFVHHKTKPKTKCRSPPGPPPLPVIGNLHQLSLLLHQSLYRLSKIHGPIFKLSLGRVPVLVISSPSLAKQVLKTHDLAFCSRASTVSFKEYTYDGCDVAGAPYGDSWRNLRKIFVLNLLSSKKLTSFRLVQEEEIEGMISSIRTRSDTNATVNITEFVVRLANNITFRVAFGYRSEGEYGEKSRFQRLLESGNDTVASFYVGDYFPGLGWLDKITGKLGKMKRNARDLDEFYQEVIDAHMKDGRKEDGKEDIVDVLLRLREEGQLTMDHIKGALMNIFVGGTDTSAASIAWAMAELARKPKVMKKAQEEVRKAASKKGKVEENDLAQLQYIKCVVNETLRLHLPLPLLVPRETIQHCEINGYDVSAKTRVLVNAWAIGRDEDAWENPEEFNPDRFVGSSLDYKGQDFQFIPFGAGRRICPGIQFGVETVELALANLLYAFNWELPPGVERENIDMHEAPGLVTRRATDLRLVATNYEEAN

SEQ ID NO: 24092 - protein, 501 aa, Asparagus officinalis
MTVSITAAVQLFLLLLLLLPLLFVHHKTKPKTKCRSPPGPPPLPVIGNLHQLSLLLHQSLYRLSKIHGPIFKLSLGRVPVLVISSPSLAKQVLKTHDLACCSRASTVSFKEYTYDGCDVAGAPYGDSWRNLRKIFVLKLLSSKKLTSFRLVQEEEIEGMISSIRTRSDTNATVNITEFVVRLANNITFRVAFGYRSEGEYGEKSRFQRLLESGNDTVASFYVGDYFPGLGWLDKMTGKLGKMKRNARDLDEFYQEVIDAHMKDGRKEDGKEDIVDVLLRLREEGQLTMDHIKGALMNIFVGGTDTSAASIAWAMAELARKPKVMKKAQEEVRKAASKKGKVEENDLAQLQYIKCVVNETLRLHLPLPLLVPRETIQHCEINGYDVSAKTRVLVNAWAIGRDEDAWENPEEFNPDRFVGSSLDYKGQDFQFIPFGAGRRICPGIQFGVETVELALANLLYAFNWELPPGVERENIDMHEAPGLVTRRATDLRLVATNYEEAN

SEQ ID NO: 24093 - protein, 230 aa, Lotus corniculatus
MTVAGYLNIGDFIPPLEWLDLQGVQGKMKKLHNRFDAFFAHIIEEQKVILKSEKHQDLLSTLLSLKEAPEDGDKLNDTEIKALLLNLFTAGTDTSSSTAEWAIAELIKNPRIMGQVQQELDNVVGKDKLVTELDMPNLPYLEAVVKETFRLHPSTPLSLPRAAAKSCEVFDYHIPKGATLLVNVWAISRDPKEWASPLEFRPERFLPGGEKASVDVRGTDFALIPFGAGR

SEQ ID NO: 24094 - protein, 201 aa, Brassica rapa subsp. pekinensis
PGTDTAAAVVVWAMTYLIKYPEAMKKAQDEVRNVVGDKGYVSEEDIPNLPYLKAVIKESLRLEPVIPILLHRETIADAKIGGYDIPAKTIIQVNAWAVSRDTAAWGDNPNEFIPERFMNEQKGVDFKGQDFELLPFGSGRRMCPAMHLGVAMVEIPFANLLYRFDWSLPKGIKPEDIKMDVMTGLAMHKKDHLVLAPRTHI

SEQ ID NO: 24095 - protein, 500 aa, Euphorbia lagascae
MEQKNLSFPSILISFLLVLILVVVMRLWKKQNPPPGPWKFPIIGNLPHLLLTSDLGHERFRALAQIYGPVMSLQIGQVSAVVISSAEAAKEVMKTQADAFAQRPIVLDAQIVFYNRKDVLFASYGDHWRQMKKIWILEFLSAKKVQSSRLIREEEMEDAITFLRSKAGSPVNITKIIYGIIISIMIRTSVGNCKQKERLLSVADAVNEAATSFGTADAFPTWKLLHYIIGAESKPRRLHQEIDDILEEILNEHKANKPFEADNLMDVLLNLQKNGNVPVPVTNESIKASVLQMFTAGSETTSKATEWVMAELMKNPTELRKAQEEVRQVFGEMGKVDESRFHDLKFFKLVVKETLRLHPPVVLIPRECRETTRIDGYEIHPNTRIVVNAWAIGRDPNTWSEPGKFNPERFKDCAIDYKGTTFELVPFGAGKRICPGITSAITNLEYVIINLLYHFNWELADGITPQTLDMTEAIGGALRKKIDLKLIPIPYQVSLGSNIS

SEQ ID NO: 24096 - protein, 509 aa, Nepeta racemosa
MVSLSYFLIALLCTLPFLLFLNKWRRSYSGKTPPPSPPKLPVIGNLHQLGLYPHRYLQSLSRRYGPLMQLHFGSVPVLVASSPEAAREIMKNQDIVFSNRPKMSIANRLFFNNRDVAFTQYGEYWRQIRSICVLQLLSNKRVQSFRRVREEETSIMVEKIMQLGSSSSTPVNLSELLLSLTNDVVCRVTLGKKYGGGNGSEEVDKLKEMLTEIQNLMGISPVWEFIPWLNWTRRFDGVDQRVDRIVKAFDGFLESVIQEHKERDGDKDGDGDGALDFVDILLQFQRENKNRSPVEDDTVKALILDMFVAGTDTTATALEWAVAELIKNPRAMKRLQNEVREVAGSKAEIEEEDLEKMPYLKASIKESLRLHVPVVLLVPRESTRDTNVLGYDIASGTRVLINAWAIARDPSVWENPEEFLPERFLDSSIDYKGLHFELLPFGAGRRGCPGATFAVAIDELALAKLVHKFDFGLPNGARMEELDMSETSGMTVHKKSPLLLLPIPHHAAP

SEQ ID NO: 24097 - protein, 511 aa, Nepeta racemosa
ILIALLCTLPFLFFLKKWRRSYSGKTPPPSPPKLPVLGNLHQLGTFPHRSLQSLSRRYGPVMQLHFGSVPVLVASSPEAAREIMKNQDLNFSNRPNLSIPRRLLYDNHDVAFAPYGEYWRQIRSICVLQLLSNKRVQSFRRVREEETSIMVEKIMQLQKTTPTAAVNLTDLLTCLTNDVFCRIALGKKYGGTTTGDGEYHVRSLKKNLAEFYVLLGISPLWEYIPWLEWTRRFDGVDRRIEEVSRTFDEFLGKVIQEHRVRDKREDTTVVGDTVGLDFVDLLLQFQRENERSSSPVDDLTIKAVILDMFLAGTDTTVTALEWALSELIKNPRAMKILQKEVRGVAGSKGEIEESDLEKMPYLKAVMKESLRLHAPVPLLVPRESTRDTKVLGYDVASGTRVLINCWAIGRDSSVWEESETFLPERFLETSIDYRGMHFELIPFGSGRRGCPGATFAAAIDELALATLVHKFDFKLPNGVRVEDLDMSEGSGFTIHKKFPLLVVPTPHACTS

SEQ ID NO: 24098 - protein, 523 aa, Campanula medium
MSIDISTLFYELVAAISLYLATYSFIRFLFKPSHHHHLPPGPTGWPIIGALPLLGTMPHVSLADMAVKYGPIMYLKLGSKGTVVASNPKAARAFLKTHDANFSNRPIDGGPTYLAYNAQDMVFAEYGPKWKLLRKLCSLHMLGPKALEDWAHVKVSEVGHMLKEMYEQSSKSVPVPVVVPEMLTYAMANMIGRIILSRRPFVITSKLDSSASASASVSEFQYMVMELMRMAGLFNIGDFIPYIAWMDLQGIQRDMKVIQKKFDVLLNKMIKEHTESAHDRKDNPDFLDILMAATQENTEGIQLNLVNVKALLLDLFTAGTDTSSSVIEWALAEMLNHRQILNRAHEEMDQVIGRNRRLEQSDIPNLPYFQAICKETFRKHPSTPLNLPRISTEACEVDGFHIPKNTRLIVNIWAIGRDPKVWENPLDFTPERFLSEKHAKIDPRGNHFELIPFGAGRRICAGARMGAASVEYILGTLVHSFDWKLPDGVVEVNMEESFGIALQKKVPLSAIVTPRLPPSSYTV

SEQ ID NO: 24099 - protein, 453 aa, Arabidopsis lyrata subsp. petraea
MESSISQTLSKVSDPTTALLIVVSLFIFIGFITRRRRPPYPPGPRGWPIIGNMLMMDQLTHRGLANLAKKYGGLCHLRMGFLHMYAVSSPDVARQVLQVQDSVFSNRPATIAISYLTYDRADMAFAHYGPFWRQMRKVCVMKVFSRKRAESWASVRDEVDKMVRSVSCNVGKPINVGEHIFALTRNITYRAAFGSACEKGQDEFIRILQEFSKLFGAFNVADFIPYFGWIDPQGINKRLVKARNDLDGFIDDIIDEHMKKKENQNAVDDGDVVDTDMVDDLLAFYSEEAKLVSEAADLQNSIKLTRDNIKAIIMDVMFGGTETVASAIEWALTELLRSPEDLKRVQQELAEVVGLDRRVEEADIEKLTYLKCTLKETLRMHPPIPLLLHETAEDTSIDGFFIPKKSRVMINAFAIGRDPTSWADPDTFRPSRFLEPGVPDFKGSNFEFIPFGS

SEQ ID NO: 24100 - protein, 538 aa, Drosophila melanogaster
MLADSYLIKFVLRQLQVQEDGDAQHLLMVFLGLLALVTLLQWLVRNYRELRKLPPGPWGLPVIGYLLFMGSEKHTRFMELAKQYGSLFSTRLGSQLTVVMSDYKMIRECFRREEFTGRPDTPFMQTLNGYGIINSTGKLWKDQRRFLHDKLRQFGMTYMGNGKQQMQKRIMTEVHEFIGHLHASDGQPVDMSPVISVAVSNVICSLMMSTRFSIDDPKFRRFNFLIEEGMRLFGEIHTVDYIPTMQCFPSISTAKNKIAQNRAEMQRFYQDVIDDHKRSFDPNNIRDLVDFYLCEIEKAKAEGTDAELFDGKNHEEQLVQVIIDLFSAGMETIKTTLLWINVFMLRNPKEMRRVQDELDQVVGRHRLPTIEDLQYLPITESTILESMRRSSIVPLATTHSPTRDVELNGYTIPAGSHVIPLINSVHMDPNLWEKPEEFRPSRFIDTEGKVRKPEYFIPFGVGRRMCLGDVLARMELFLFFASFMHCFDIALPEGQPLPSLKGNVGATITPESFKVCLKRSPLGPTAADPHHMRNVGAN

SEQ ID NO: 24101 - protein, 538 aa, Drosophila melanogaster
MLADSYLIKFVLRQLQVQQDGDAQHLLMVFLGLLALVTLLQWLVRNYRELRKLPPGPWGLPVIGYLLFMGSEKHTRFMELAKQYGSLFSTRLGSQLTVVMSDYKMIRECFRREEFTGRPDTPFMQTLNGYGIINSTGKLWKDQRRFLHDKLRQFGMTYMGNGKQQMQKRIMTEVHEFIGHLHASDGQPVDMSPVISVAVSNVICSLMMSTRFSIDDPKFRRFNFLIEEGMRLFGEIHTVDYIPTMQCFPSISTAKNKIAQNRAEMQRFYQDVIDDHKRSFDPNNIRDLVDFYLCEIEKAKAEGTDAELFDGKNHEEQLVQVIIDLFSAGMETIKTTLLWINVFMLRNPKEMRRVQDELDQVVGRHRLPTIEDLQYLPITESTILESMRRSSIVPLATTHSPTRDVELNGYTIPAGSHVIPLINSVHMDPNLWEKPEEFRPSRFIDTEGKVRKPEYFIPFGVGRRMCLGDVLARMELFLFFASFMHCFDIALPEGQPLPSLKGNVGATITPESFKVCLKRRPLGPTAADPHHMRNVGAN

SEQ ID NO: 24102 - protein, 522 aa, Salmo salar
MVLMILPIIGSVSVSEGLVAMVTLCLVYMFMKYKHTEIPEGLKRLPGPKPLPIIGNVLEVHNNPHLSLTAMSERYGSVFQIQIGMRPVVVLSGSETVRQALIKQGEDFAGRPDLYSFKFINDGKSLAFSTDKAGVWRARRKLAMSALRSFATLEGSTPEYSCALEEHVCKEGEYLVKQLTSVMDVSGSFDPFRHIVVSVANVICGMCFGRRYSHDDQELLSLVNLSDEFGQVVGSGNPADFIPILRYLPNRTMKRFMDINDRFNAFVQKIVSEHYESYDKDNIRDITDSLIDHCEDRKLDENANIQVSDEKIVGIVNDLFGAGFDTISTALSWAVVYLVAYPEIQERLHQELTEKVGLNRTPRLSDKTNLPLLEAFILEIFRHSSFLPFTIPHCTIKDTSLNGYFIPKDTCVFINQWQVNHDPELWKEPSLFNPDRFLSADGTELNKLEGEKVLVFGMGKRRCIGEAIGRNEVYLFLAILLQRLRFQEKPGHPLDMTPEYGLTMKHKRCQLKASLRPWGQEE

SEQ ID NO: 24103 - protein, 469 aa, Capsicum chinense
PIPVPVFGNWLQVGDDLNHRNLTDYAKKFGDIFLLRMGQRNLVVVSSPESAKEVLHTQGVEFGSRTRNVVFDIFTGKGQDMVFTVYGEHWRKMRRIMTVPFFTNKVVQQYRGGWESEVASVVEDVKKNPESATNGIFLRKRLQLMMYNNMFRIMFDRRFESEDDPLFVKLRALNGERSRLAQSFEYNYGDFIPIFRPFLRGYLKICKEVKEKRLQLFKDYFVDERKKLANTKSMDSNALTCAIHHILDAQQKGEINEDNVLYIVENINVAAIQTTLWSIEWGIAELVNHPHIQQKLREEIDTVLGPGVQVTEPDTQKLPYLQAVIKETLRLRMAIPLLVPHMSLHDAKLAVYDIPAESKILVNAWWLANNPAHWKKPEEFRPERFLEEEKHVDANGNDFRFLPFGVGRRSCPGIILALPILGITLGRLVQNFEMFPPPGQSKLDTSEKGGQFSLHILKHSTIVMKPRSF

SEQ ID NO: 24104 - protein, 521 aa, Fundulus heteroclitus
MALMILPFIGALSVSEGLIALVTVCLVYLTLKHFRREIPEGLRRLPGPTPLPIIGNFLELGSKPYLSLTEMSKRFGDVFQIQLGMRPVVILSGYETVKQALTKQGDDFAGRPDLYSFRFINDGKSLAFSTDKAGVWRARRKLAYSALRSFSSLEGKLPEYSCVLEEHICKETEHLIKELHNVMTAEGKFDPFRYIVVSVANVICGMCFGRRYDHHNQELLSLVNLAEDFVQVTGSGNPADFIPALQFLPNKSMKKFVNLNNRFNNFVQKIVSEHYSTFDKDNIRDITDSLIDHCEDRKLDENSNIQMSDEKIVGIVNDLFGAGFDTISTALSWAVMYLVAYPEVEERLYEEIKEKVGLDRTPVMSDRSNLPLLESFILELFRHSSYLPFTIPHCSTKDTSLNGYFIPKDTCVFVNQWQINHDPELWKDPSMFIPDRFLSADGTEVNKQEGEKVLIFGLGRRRCIGEVIARNEVFLFLAIIIQKLHFYKLPGEPVDMTPEYGLTMKHKRCYLGVAMRAKDVQ

SEQ ID NO: 24105 - protein, 208 aa, Populus x canescens
LIAGGTESSAVTVEWAISEILRKPEVFEKATEELDRVIGRERWVEEKDMVNLPYIYAIAKEVMRLHPVAPMLVPRAAREDININGYDIKKGSRVLVNVWTIGRDPKVWDKPDEFFPERFIGNSIDVRGHDYELLPFGAGRRMCPGYPLGLKVIQATLSNLLHGFKWRLPDGQKKEDLNMDEIFGLSTPKKYPLVAVAEPRLPAHVYPK

SEQ ID NO: 24106 - protein, 511 aa, Xenopus laevis
MISYVAGALLLAFGLALISVWKFAGGKHRGAKYPNSLPCLPFIGSLLHIGNHLPPHILFCKLQEKYGSLYSFRMGSHYIVIVNHHEHAKEVLLKKGKTFGGRPRAVTTDILTRNAKDIAFANYSPSWKFHRKVVHAALSMFGEGTVAIEKIISREATSLCQSLISFQDNPLDMAPELTRAVTNVVCALCFNTRYKRCDPEFEEMLAYSKGIVDTVAKDSLVDIFPWLQIFPNKDLDILKRSVAIRDKLLQKKLKEHKEAFCNEEVNDLLDALLKAKLSMENNNSNISQEVGLTDDHLLMTVGDIFVAGVETTTTVLKWTMAYLLHYPEVQTKIQEELDFKVGFGRHPVLSDRRILPYLDATISEVLRIRPVAPLLIPHVALQESSIAEYTIPQDARVVINLWSLHHDPNEWENPEEFNPERFLDENGNHVYSPSQSYLPFGAGIRVCLGEALAKMEVFLFLSWILQRFTLELPAGDSLPDLDGKFGVVLQVKKFRVTTKLREAWKNIDLTT

SEQ ID NO: 24107 - protein, 508 aa, Gallus gallus
MPPLAVLLLALALLCAWRLSYSQGPTGTGTGRPRSLPALPLVGSLLQLAGHPQLHLRLWRLQGRYGSLYGLWMGSHYVVVVNSYQHAREVLLKKGKAFAGRPRTVTTDLLSRGGKDIAFASYGPLWKFQRKLVHAALSMFGEGSVALEKIICREAASLCETLGAAQDMALDMAPELTRAVTNVVCSLCFNSSYRRGDPEFEAMLEYSQGIVDTVAKESLVDIFPWLQIFPNRDLALLKRCLKVRDQLLQQKFTEHKEAFCGDTVRDLMDALLQVRLNAENNSPLEPGLELTDDHLLMTVGDIFGAGVETTTTVLKWAVLYLLHYPEVQKKIQEEMDQKIGLARHPHLSDRPLLPYLEATISEGLRIRPVSPLLIPHVSLADTSIGEYSIPKGARVVINLWSVHHDEKEWDKPEEFNPGRFLDEQGQHIHSPSPSYLPFGAGIRVCLGEVLAKMELFLFLAWVLQRFTLECPQDQPLPSLEGKFGVVLQVQKFRVKARLREAWRGEMVR

SEQ ID NO: 24108 - protein, 516 aa, Oryctolagus cuniculus
MAMSPAAPLSVTELLLVSAVFCLVFWAVRASRPKVPKGLKRLPGPWGWPLLGHLLTLGKNPHVALARLSRRYGDVFQIRLGSTPVVVLSGLDTIKQALVRQGDDFKGRPDLYSSSFITEGQSMTFSPDSGPVWAARRRLAQDSLKSFSIASNPASSSSCYLEEHVSQEAENLIGRFQELMAAVGRFDPYSQLVVSAARVIGAMCFGRRFPQGSEEMLDVVRNSSKFVETASSGSPVDFFPILRYLPNRPLQRFKDFNQRFLRFLQKTVREHYEDFDRNSIQDITGALFKHSEKNSKANSGLIPQEKIVNLVNDIFGAGFDTITTALSWSLMYLVTNPRRQRKIQEELDAVVGRARQPRLSDRPQLPYLEAFILELFRHTSFVPFTIPHSTTRDTTLNGFHIPKECCIFINQWQINHDPQLWGDPEEFRPERFLTADGAAINKPLSEKVTLFGLGKRRCIGETLARWEVFLFLAILLQRLEFSVPPGVPVDLTPIYGLTMKHPRCEHVQARPRFSDQ

SEQ ID NO: 24109 - protein, 518 aa, Oryctolagus cuniculus
MVSDFGLPTFISATELLLASAVFCLVFWVAGASKPRVPKGLKRLPGPWGWPLLGHVLTLGKNPHVALARLSRRYGDVFQIRLGSTPVVVLSGLDTIKQALVRQGDDFKGRPDLYSFSFVTKGQSMIFGSDSGPVWAARRRLAQNALNSFSVASDPASSSSCYLEEHVSQEAENLISKFQELMAAVGHFDPYRYVVMSVANVICAMCFGRRYDHDDQELLSLVNLNDEFGKVAASGSPADFFLILRYLPNPALDTFKDLNERFYSFTQERVKEHCRSFEKGHIRDITDSLIKHYRVDRLDENANVQVSDEKTVGIVLDLFGAGFDTVTTAISWSLMYLVTKPRIQRKIQEELDAVVGRARRPRFSDRPQLPYLEAVIMETFRHTSFLPFTIPHSTTRDTSLGGFYIPKGRCVFVNQWQNNHDPELWGDPEAFRPERFLTPSGAVDKALTEKVLLFGLGKRKCIGETIGRLEVFLFLATLLQQVEFSVSPGTTVDMTPIYGLTMKHARCEHFQAKLRFEA

SEQ ID NO: 24110 - protein, 516 aa, Oryctolagus cuniculus
MAMSPAAPLSVTELLLVSAVFCLVFWAVRASRPKVPKGLKRLPGPWGWPLLGHLLTLGKNPHVALARLSRRYGDVFQIRLGSTPVVVLSGLDTIKQALVRQGDDFKGRPDLYSSSFITEGHSMTFSPDSGPVWAARRRLAQDSLKSFSIASNPASSSSCYLEEHVSQEAENLIGRFQELMAAVGRFDPYSQLVVSAARVIGAMCFGRRFPQGSEEMLDVVRNSSKFVETASSGSPVDFFPILRYLPNRPLQRFKDFNQRFLRFLQKTVREHYEDFDRNSIQDITGALFKHSEKNSKANSGLIPQEKIVNLVNDIFGAGFDTITTALSWSLMYLVTNPRRQRKIQEELDAVVGRARQPRLSDRPQLPYLEAFILELFRHTSFVPFTIPHSTTRDTTLNGFHIPKECCIFINQWQINHDPQLWGDPEEFRPERFLTADGAAINKPLSEKVTLFGLGKRRCIGETLARWEVFLFLAILLQRLEFSVPPGVPVDLTPIYGLTMKHPRCEHVQARPRFSDQ

SEQ ID NO: 24111 - protein, 341 aa, Mus musculus
MSLHGKRKEIYKYEAPWTVYAMNWSVRPDKRFRLALGSFVEEYNNKVQLVGLDEESSEFICRNTFDHPYPTTKLMWIPDTKGVYPDLLATSGDYLRVWRVGETETRLECLLNNNKNSDFCAPLTSFDWNEVDPYLLGTSSIDTTCTIWGLETGQVLGRVNLVSGHVKTQLAHDKEVYDIAFSRAGGGRDMFASVGADGSVRMFDLRHLEHSTIIYEDPQHHPLLRLCWNKQDPNYLATMAMDGMEVVILDVRVPCTPVARLNNHRACVNGIAWAPHSSCHICTAADDHQALIWDIQQMPRAIEDPILAYTAEGEINNVQWASTQPDWIAICYNNCLEILRV

SEQ ID NO: 24112 - protein, 353 aa, Rattus norvegicus
MSLHGKRKEIYKYEAPWTVYAMNWSVRPDKRFRLALGSFVEEYNNKGFVSHVGESCEEWPHKALKSAVEEQSGTIHTDLRRHSYSNGDYLRVWRVGETETRLECLLNNNKNSDFCAPLTSFDWNEVDPYLLGEGFEFQLEENEDTFPQIRPIDTTCTIWGLETGQVLGRVNLVSGHVKTQLIAHDKEVYDIAFSRAGGGRDMFASVGADGSVRMFDLRHLEHSTIIYEDPQHHPLLRLCWNKQDPNYLATMAMDGMEVVILDVRVPCTPVARLNNHRACVNGIAWAPHSSCHICTAADDHQALIWDIQQMPRAIEDPILAYTAEGEINNVQWASTQPDWIAICYNNCLEILRV

SEQ ID NO: 24113 - protein, 325 aa, Anopheles gambiae str. PEST
MSGTTGKRKEIYKYLAPWPLYSMNWSVRPDKRFRLALGSFVEEYNNKVQIISLDEDTSEFSAKSTFDHPYPTTKIMWIPDSKGVYPDLLATSGDYLRLWRAGEPDTRLECVLNNNKNSDFCAPLTSFDWNEVDLNLVGTSSIDTTCTIWGLETSQPLGRVNLVSGHVKTQLIAHDKEVYDIAVRMFDLRHLEHSTIIYEDPAHTPLLRLAWNKQDPNYLATVAMDSCEVIILDVRVPCTPVARLSNHRACVNGIAWAPHSSCHICTAGDDHQALIWDIQQMPRPIEDPILAYTAAEGEVNQIQWGATQPDWIAICYKTACEILRV

SEQ ID NO: 24114 - protein, 377 aa, Giardia lamblia ATCC 50803
MPNFSVMLLSSSTSLYALKISASSESIHSERVLNACPQLKKNQAPQMSGRCFTFSAHGPLYGLSWSCRTDMPMRLAISTISDACPNEFSIISLQKERRDFRVVASASVVYPLSKIQFLPSKDVSNPDLIATVSDSLRIFEIDNLKDDGRAELCSRGRLLVNETRPVPILSMDWCAHSLNIIMTANLDTTVSLWDIYKQEVDIRFVAQERAVTDCCFSLKDPNRFLTCGAEGNLRLYDRRRMHVANEIYTGNEAILRAQFKPTDSNFITCFGEKSTDIILLDARSTVKPLARLKGHTDYINGISWGRDSHGGYFVSVANDGRALIWDGGSGTYTPFMEYVATSASGEPLGPINSVDWNQSNHDWVALTVDDEVQILHV

SEQ ID NO: 24115 - protein, 345 aa, Gossypium hirsutum
MENSTQESHLRSDNSVTYESAYTVYAMALSSTPSSTNINHQRIALGSFLEDYTNRVDIISFDPETLSFKTHPKLAFDHPYPPTKLMFQPNRKSASSSSSCSDLLASTGDFLRLWEVRESSIEPVTVLNNSKTSEFCAPLTSFDWNDVEPKRIGTSSIDTTCTIWDIEKCVVETQLIAHDKEVYDIAWGEARVFASVSADGSVRIFDLRDKEHSTIIYESPQPDTPLLRLAWNKQDLKYMATIQMDSNKVVILDIRSPTTPVAELERHHASVNAIAWAPQSCKHICSAGDDTQALIWELPTVAGPNGIDPLCVYSAGYEINQLQWSAAQPDWIAIAFSNKLQLLKV

SEQ ID NO: 24116 - protein, 345 aa, Gossypium hirsutum
MENSTQESHLRSDNSVTYESAYTVYAMALSSTPSSTNINHQRIALGSFLEDYTNRVDIISFDPETLSFKTHPKLAFDHPYPPTKLMFQPNRKSASSSSSCSDLLASTGDFLRLWEVRESSIEPVTVLNNSKTSEFCAPLTSFDWNDVEPKRIGTSSIDTTCTIWDIEKCVVETQLIAHDKEVYDIAWGEARVFASVSADGSVRIFDLRDKEHSTIIYESPQPDTPLLRLAWNKQDLKYMATIQMDSNKVVILDIRSPTTPVAELERHHASVNAIAWAPQSCKHICSAGDDTQALIWELPTVAGPNGIDPLCVYSAGYEINQLQWSRAQPDWIAIAFSNKLQLLKV

SEQ ID NO: 24117 - protein, 343 aa, Gossypium hirsutum
MENSTQESHLRSDNAVTYESPYPLYAMALSSTPAVTHLNYQRIALGSFIEDYTNRVHIISFDPESLTLITHPSLSFDHPYPPTKLMFQPHRKSPFSSSSDLLASSGDYLRLWEVGHSSIELISVLDNSKTSEFSAPLTSFDWNDVEPNRIGTSSIDTTCTIWDIEKGVVETQLIAHDKEVYDIAWGEGRVFGSVSADGSVRIFDLRDKEHSTIIYESPQPDTPLLRLAWNKQDLRYMATTLMDSNKVVILDIRSPTTPVAELDRHGASVNAIAWAPQSCKHICSAGDDTHALIWELPTVAGPNGIDPLSMYSASSEINQLQWSAAQPDWIAIAFSNKMQLLKV

SEQ ID NO: 24118 - protein, 341 aa, Gossypium hirsutum
NSTQESHLRSDNAVTYESPYPLYAMALSSTPAVTHLNHQRIALGSFIEDYANRVHIISFDPESLTLTTHPSLSFDHPYPPTKLMFQPHRKSPFSSSSDLLASSGDYLRLWEVGHSSIELISILDNSKTSEFSAPLTSFDWNDVEPNRIGTSSIDTTCTIWDIEKGVVETQLIAHDKEVYDIAWGEARVFGSVSADGSVRIFDLRDKEHSTIIYESPQPDTPLLRLAWNKQDLRYMATTLMDSNKVVILDIRSPTMPVAELDRHGASVNAIAWAPQSYKHICSAGDDTHALIWELPTVAGPNGIGPLSMYSASSEINQLQWSATQPDWIAIAFSNKMQLLKV

SEQ ID NO: 24119 - protein, 341 aa, Arabidopsis thaliana
MDNSAPDSLSRSETAVTYDSPYPLYAMAFSSLRSSSGHRIAVGSFLEDYNNRIDILSFDSDSMTVKPLPNLSFEHPYPPTKLMFSPPSLRRPSSGDLLASSGDFLRLWEINEDSSTVEPISVLNNSKTSEFCAPLTSFDWNDVEPKRLGTCSIDTTCTIWDIEKSVVETQLIAHDKEVHDIAWGEARVFASVSADGSVRIFDLRDKEHSTIIYESPQPDTPLLRLAWNKQDLRYMATILMDSNKVVILDIRSPTMPVAELERHQASVNAIAWAPQSCKHICSGGDDTQALIWELPTVAGPNGIDPMSVYSAGSEINQLQWSSSQPDWIGIAFANKMQLLRV

SEQ ID NO: 24120 - protein, 341 aa, Arabidopsis thaliana
MDNSAPDSLSRSETAVTYDSPYPLYAMAFSSLRSSSGHRIAVGSFLEDYNNRIDILSFDSDSMTVKPLPNLSFEHPYPPTKLMFSPPSLRRPSSGDLLASFGDFLRLWEINEDSSTVEPISVLNNSKTSEFCAPLTSFDWNDVEPKRLGTCSIDTTCTIWDIEKSVVETQLIAHDKEVHDIAWGEARVFASVSADGSVRIFDLRDKEHSTIIYESPQPDTPLLRLAWNKQDLRYMATILMDSNKVVILDIRSPTMPVAELERHQASVNAIAWAPQSCKHICSGGDDTQALIWELPTVAGPNGIDPMSVYSAGSEINQLQWSSSQPDWIGIAFANKMQLLRV

SEQ ID NO: 24121 - protein, 342 aa, Malus x domestica
MENSTQESHLRAENSVTYESPYPLYAMAFASPQTRTRHQHHRIAVGSFIEEYSNRVDILSFDPDTLSIKPNPTLSFDHPYPPTKLMFHPNPNALHKTNDVLASSGDYLRLWEVGDSTVEPIQVLNNSKTSEFCAPLTSFDWNDIEPRRIGTSSIDTTCTIWDIEKGVVETQLIAHDKEVYDIAWGEARVFASVSADGSVRIFDLRDKEHSTIIYESPQPDTPLLRLAWNKQDLRYMATILMDSNKVVILDIRSPTMPVAELERHRGSVNAIAWAPQSCRHICSAGDDTQALIWDLPTVAGPNGIDPMSMYSAGAEINQLQWSAAQPDWISIAFSNKMQLLKV

SEQ ID NO: 24122 - protein, 489 aa, Tortula ruralis
MARTKKKAQRGKTIKKKKEDVEEVEMMEEDGSGPSQPQQQQGPTKVWQPGVDEMADDEELQFDPTAYHCLHSFKLGWPCLSFDIMRDDLGVLRRDFPHSLQCVAGTQADQAGNNAIAVVRMTNITGKIPKAPSATMDEDGQDSDSESSDDEDEEEVVPEQPGAPDQPVQSKKPIFKVRLVAHQGCVNRVRAMTQQSNIVATWADTGYVQVWDMAAHLRSMATSGPDAPGQPSTVRQAPLHIFTGHKDEGYALDWSPITAGRLLSGDCKSAIHLWEPTPAGKWVVEKAPYTGHTASVEDLQWSPTEADVFASCSVDQTLRIWDTRTRSGSAIAIKAHNADINVISWNRLVSCMLASGCDDGTFRIWDLRNFKEDSFVAHFKYHTLPITSIEWSPHEQSTLSVTSADHQLTIWDLSLERDPEEEAVYQAQLKQNQAEAPEDLPPQLLFVTTGQKDLKECHWHPQIQGMLMSTAGDGFNILRPSNLDNLPAL

SEQ ID NO: 24123 - protein, 337 aa, Petunia x hybrida
MENSSQESQHLRSENSVTYDSTYPIYSMAFSSFPTPRRRIAVGSFIEELNNRVELLSFNEETLTLNPIPNLSFDHPYPPTKLMFHPNPIKSNNDILASSGDYLRLWEVKESSIEPLFTLNNSKTSEYCAPLTSFDWNEVEPKRIGTSSIDTTCTIWDVEKGVVETQLIAHDKEVYDIAWGEAGVFASVSADGSVRIFDLRDKEHSTIIYESPTPDTPLLRLAWNKQDLRYMATILMDSNKVVILDIRSPAMPVAELERHQASVNAIAWAPQSCRHICSGGDDGQALIWELPTVAGPNGIDPMSMYSAGAEINQLQWSPAQRDWIAIAFSNKLQLLKV

SEQ ID NO: 24124 - protein, 299 aa, Dictyostelium discoideum
MWIPDKNSNRPDLLATTGDYLRLWEVGSNQRSIKLKSLLTNVIGGSSSSSSSSSSSSSSSSSSSSSSSSSSSSSSSSSSSSSSTDISSEFCAPLSSFDWNETDPSLLATSSIDTTCTIWNIETGQAKTQLIAHDKEVFDIAFARGTDLFASVGADGSLRMFDLRNLEHSTIIYETPSFVPLLRLCWNKQDPNYLATIQQDSPKVIILDIRVPSVPAAELVFHKSAVNGISWAPHSSCHICTVSDDKQALIWDLSSMPKPIEDPLLTYNALAEINQLSWSSSQPDWIAIAFSSHLQILKV

SEQ ID NO: 24125 - protein, 342 aa, Oryza sativa
  unsure (1)..(342): unsure at all Xaa locations
PSVAASAAEAQNPNAFTCELPHSIYALAFSXLRARXLAAGSFLEDLHNRVSLLSFDPVHPTAASFRALPALSFDHPYPPTKLQFHPRAASAXXHLLASSSDALRLWXLPRSTISPPSVLDNRKTSASEFCAPLTSFDWNEAEPRRIGTASIDTTCTIWDIERGVVETQLIAHDKAVHDIAWGENGIFASVSADGSVRVFDLRDKEHSTIFYESPRPDTPLLRLAWNRYDFHYMATLLMDSSAVVVLDMRAPGVPVAELHRHRACANAVAWAPQATRHLCSAGDDGQALIWELPATPGAVPAEGIDPVMVYDAGAEINQLQWAAAYPEWISIAFENKVQLLRV

SEQ ID NO: 24126 - protein, 342 aa, Oryza sativa; identical to SEQ ID NO: 24125
  unsure (1)..(342): unsure at all Xaa locations

SEQ ID NO: 24127 - protein, 339 aa, Oryza sativa
  unsure (1)..(339): unsure at all Xaa locations
GGRGGGGGEAKRSEIYTYEAGWHIYGMNWSVRRDKKYRLAIASLLEQHNNHVQVVQLDESSGDIAPVLTFDHPYPPTKTMFVPDPHSVRPDLLATSADHLRIWRIPSPDEAVELRXAALNGNRNSDYCGPLTSFDWNDADPRRIGTSSIDTTCTIWDVEREAVDTQLIAHDKEVYDIAWGGAGVFASVSADGSVRVFDLRDKEHSTIIYESAASPTPLVRLGWNKQDPRYMATIIMDSPKVVVLDIRYPTLPVVELHRHHSPVNAIAWAPHSSCHICTAGDDSQALIWDLSSMGTGTEGGLDPILAYTAGAEIEQLQWSATQPDWVAIAFSTKLQILRV

SEQ ID NO: 24128 - protein, 346 aa, Oryza sativa
  unsure (1)..(346): unsure at all Xaa locations
EQRNGGGRGGGGGEAKRSEIYTYEAGWHIYGMNWSVRRDKKYRLAIASLLEQHNNHVQVVQLDESSGDIAPVLTFDHPYPPTKTMFVPDPHSVRPDLLATSADHLRIWRIPSPDEAVELRCELNGNRNSDYCGPLTSFDWNDADPRRIGTSSIDTTCTIWDVEREAVDTQLIAHDKEVYDIAWGGAGVFASVSADGSVRVFDLRDKEHSTIIYESAASPTPLVRLGWNKQDPRYMAAVIMDSPEGLLRDCRLPSLPGAALHRPPFAPSTAFARAPVSSRPPCTAXGDDSLPLIWDXLSSMGTGTEVGLDPILAYTAGAEIEQLQWSATQPDWVAIAFSTKLQILRV

SEQ ID NO: 24129 - protein, 228 aa, Triticum aestivum
  unsure (1)..(228): unsure at all Xaa locations
MDQPKPTPSAAASPAGADAAPNPYAFTCELPHSIYALAFSXXSAPVLAAGSFLEDLHNRVSLLCFDSVHPTVRAVPSLSFDHPYPPTKLQFNPRAASTPLLASSSDALRLWHAPLDDLSASAPAPELRSVLDNRKASASDFCAPLTSFDWNEIEPRRIGTACIDTTCTVWDIERGVVETQLIAHDKAVHDIAWGEAGVFASVSADGSVRVFDLRDKEHSTIVYESPRX

SEQ ID NO: 24130 - protein, 138 aa, Triticum aestivum
  unsure (1)..(138): unsure at all Xaa locations
XEHSTIIYESSSGGAPLVRLGWNKQDPRYMATIIMDSPKVVVLDIRYPTLPVVELHRHHAPVNAMAWAPHSSCHICTAGDDSQALIWDLSSMGTGNKGGLDPILAYTAGAEVEQLQWSATQPDWVAIVFANKLQILRV

SEQ ID NO: 24131 - protein, 229 aa, Triticum aestivum
  unsure (1)..(229): unsure at all Xaa locations
ELQRRHGRRRRSRGCRWVGGSGPGERREPRQAKRSEIYTYEAGWHIYGMNWSVRRDKKYRLAIASLLEQLVNRVEVVQLDESTGDIAPVLSFDHPFPPTKSMFVPDPQGLRPDLLATSADLLRIWRITDDQPGVKLCCELNGHRNSDSAPPRLSRPGDAADPRRIGTSSIDATCTIWDVEREVVHTQLIAHDKEVYDIAWGGAGVFASVSADGSVRVFDLRDKEHSTIX

SEQ ID NO: 24132 - protein, 94 aa, Triticum aestivum
  unsure (1)..(94): unsure at all Xaa locations
VGVFASVSADGSVRVFDLRDKEHSTIVYESPRPDTPLLRLAWNRYDLRYMAALLMDSNAVVVLDIRAPGVPVAELHRXGGCVNAVAWAPQAARH

SEQ ID NO: 24133 - protein, 122 aa, Triticum aestivum
  unsure (1)..(122): unsure at all Xaa locations
XQPAPIVYGSSPPPAPRGRLGWNKQDPRYMATIIMDSPKVVVLDIRAPTXIWDLXXPWARGTIAEAMEMEMAMLLQLQXAEGGLDPILAYTAGAEVEQLQWSATQPDWVAIVFANKLQILRV

SEQ ID NO: 24134 - protein, 359 aa, Zea mays
MGGVGEGDAWADQEQGNGGGSRGVGGGGGEAKRSEIYTYEAAWHIYAMNWSVRRDKKYRLAIASLLEQVTNRVEVVQLDEASGDIAPVLTFDHQYPPTKTMFMPDPHALRPDLLATSADHLRIWRIPSSDDAEDLRSELNGNRNSDYCGPLTSFDWNDADPRRIGTSSIDTTCTIWDVEREAVDTQLIAHDKEVYDIAWGGAGVFASVSADGSVRVFDLRDKEHSTIIYESGSAPTPLVRLGWNKQDPRYMATIIMDSPKVVVLDIRYPTLPVVELHRHHAPVNAIAWAPHSSCHICTAGDDMQALIWDLSSMGTAAEGGLDPILAYTAGAEIEQLQWSATQPDWVAIAFANKLQILRV

SEQ ID NO: 24135 - protein, 327 aa, Zea mays
  unsure (1)..(327): unsure at all Xaa locations
MDPPKPPSSVASSSGPXXTPNPHAFTCELPHSIYALAFSPVAPVLASGSFLEDLHNRVSLLSFDPVRPSAASFRALPALSFDHPYPPTKLQFNPRAAAPSLLASSADTLRIWHISDTAPAPELRSVLDNRKASSEFCAPLTSFDWNEVEPRRIGTASIDTTCTVWDIDRGVVETQLIAHDKAVHDIAWGEAGVFASVSADGSVRVFDLRDKEHSTIVYESPRPDTPLLRLAWNRSDLRYMAALLMDSSAVVVLDIRAPGVPVAELHRHRACANAVAWAPQATRHLCSAGDDGQALIWELPETAAAVPAEGIDPVLVYDAGAEINQLX

SEQ ID NO: 24136 - protein, 143 aa, Zea mays
  unsure (1)..(143): unsure at all Xaa locations
DPPRIGTPSIDTTCTIWYVERESVDTQLMAHDKEVSDIAWGGAGVLPSVSADGSVRVFDFRDKEHSTIIYESGSAPTPLVRLGWIKQDPRYMATIIMDSPKVVVLDIRYPTLPVVELHRPHAPVNAIAWAPHLXCHXCQGTSP

SEQ ID NO: 24137 - protein, 143 aa, Zea mays; identical to SEQ ID NO: 24136
  unsure (1)..(143): unsure at all Xaa locations

SEQ ID NO: 24138 - protein, 333 aa, Perilla frutescens
MENSTQESHPRPENVVTYDSPYPIYAMAISAVNRRRVAVGSFVEELKNHVDILSFSEDSSSLKPVPSLSFDHPYPPTKLLFHPSVSAPSNLLASSGDFLRLWEVKDSSIVAVSTLNNSKTSEYSAPLTSFDWNEVEPRRIGTSSIDTTCTIWDIEKGAVETQLIAHDKEVYDIAWGEAGVFASVSADGSVRIFDLRDKEHSTIIYESPMPDTPLLRLAWNKQDLRYMATILMDSNKIVILDIRSPTMPVAELERHSASVNAIAWAPQSCKHICSAGDDGQSLLWELPTVAGPNGIDPMTMYSAGAEINQLQWSAAQPDWIAIAFANKMQMLKV

SEQ ID NO: 24139 - protein, 435 aa, Schizosaccharomyces pombe
MTDLRRNRYSISAGVGKSVLDSLGKFYGSPKRQLPNKFEAGKEYTGYNAPWIPFALDWLKQGKYSSEWIAMGSLNEEPNNMIQLLKLITGDDGNSHLEKAQAATDLEYPVTKLLWNPSSVGSNTDSQLLASTDQQLRLWKTDFEAGIDSPLLCQASLSTHVKTHNNAPLTSFDWCKTDPSYIVVSSLDTTCTVWDIVAQQSKTQLIAHDKEVYDVAFLKDSINVFVSVGADGSVRMFDLRSLDHSTIIYEGDSTFWKRNGDYTNASPPVSAPLLRLSACDSDVNLMATFHHNSSDVQMIDIRVPGTAYATLRGHKGDVNAVKWMPGSKSKLATCGDDCVVSLWDLDQPVNPSPAPTLSVSGTTPGMTGSTSEYVTPVSSVNSMRETASPLNADNQYSPLLSWKLEHEVNNLSWSVKNDGLAVVYGKSLEILKVPQ

SEQ ID NO: 24140 - protein, 523 aa, Saccharomyces cerevisiae
MDPFHNGNKRSSISFGSSQRQPYNKNNYLSGTNGPSSAAQDQGRGPSPFGMSGNTTNGGNSKRNSGCDLSATYYASRSPMYSPLDFSPPVFSPNHSQLQQARGYAANIPVVSNLMNPSMASVCEYQSHYPLFGLDWSADDYVCLGSYKEDSRNKLQVLHSNDLLSWESVVDADVVYPVSKIQWVPSQLYPRKLATCSDSLRIWSVSPEERQFQEQINLSLCKYNRQHPANPAAADDMKVIGTFPPITSFDWNTVDTNLIISSSIDTTCIVWDLQSSHYVKTQLIAHDSEVFDVRFLTKSTQLFASCGGDGSVRVFDLRSLAHSTIIYEPPSSSVSGATAGTITPSSKGSDALLRLEPSPYDPNVLATFAADSNKIIILDMRNPESPILNLQGHGSSVNGIKWHPTKRNVLLSCGDDCQVLYWDLNSSFMEINAAGSKSPSIHGTSLEDPDGDTEMTDGGAGSGLNEDPLSLNNNSKQVCKTLETPNMMYANKTQEINNIAWRPQRGDWFGCVSGKKFQNVRVL

SEQ ID NO: 24141 - protein, 592 aa, Neurospora crassa
MNQQSQQYQPARRPSAYASHGDELHMSAHQAHLSSPREYASSGAPHIKLEQMPSSPPNMQSYQSAGAVPNVLQPGGMSSRPPVMQSNTAPTLPTMQQSADYKSHGYERSSPATLASNSYDGGNSPYSAYNPTPPGGSSSSQYMSPASTNKYAAASSSRNVSNTPLGLSDIRPRADSTLSDGMLPGSQAYELANPQSRTSNYMAPWATYSFDWCKWRPSANSAGKLAIGSYLEDGHNYIQILEANLTQTPPDVYVPGTSKYSMDFTRTAEATHSYPVTRLLWEPPSSQKQSTDLLATSGDHLRLWSLPADPVVPTSGSSITSRSGRDAPITKLTPLALLSNSKTPDHTAPLTSLDWNTVQPSLIITSSIDTTCTIWDIPSLTAKTQLIAHDKEVYDVRFCANSVDVFVSCGQDGSVRMFDLRSLEHSTIIYEPTGKEERDANGGRISPTLAQQTMSHPPPLLRLATSPHDQHLLATFAMDSNVIRILDVRQPGQALLELRGHGGSLNCIEWSPTRRGTLASGGDDCQVLIWDLLNQPSGLTPAGQPDNVRSPVASWQCDYEVGNLGWVPPMGNGEYGDWLGVSAGRGVWGVRF

SEQ ID NO: 24142 - protein, 632 aa, Podospora anserina
MNQQQQYQQPSRRTDAYSSQHDELHLPSSSSMAHQGQHPLQQQQQQLPTRQYSSGPGVPPHIKLEQSPNPQQHHHQSAGVVPNVLQPGGLQTRPPVISSNTAPVLPTMQQQQPPDYQPHQTPTKSNSMNLSHNYPRSSPAAPYEGGSGYSAYAPNTPGGAGSSSQYMSPTDSKYSQSSGSQRIPSNAPLGLADIRPRADSSLSDGIPGTTSYEHANTQSRTSNYMAPWALYAFDWCKWAPQGNSAGKVAIGSYLEDGHNYIQILDAQVSPTPSDVYSPAGSRYTMDFTRIAEATHSYPVTRLLWEPPSSQKQSTDLLATSGDHLRLWSLPSDPQVQTPGSSITSRNGRDMPITKLTPLALLSNSKTPDHTAPLTSLDWNTVTPSLIITSSIDTTCTIWDIPSLTAKTQLIAHDKEVYDVRFCANSVDVFVSCGQDGSVRMFDLRSLEHSTIIYEPTGKEERDANGGRISPTLAQQTMSHPPPLLRLATSPHDQHLLATFAQDSNVIRILDVRQPGQALLELRGHGGALNCVEWSPLRRGTLASGGDDCQVLIWDLLNNNNTSNAATISTNGAAPPTGAQAAASTDNVRSPVAAWQCEYEVGNLGWVPHLAGGEYGDWLGVSAGRGVWGVKLG

SEQ ID NO: 24143 - protein, 478 aa, Caenorhabditis elegans
MIDQSQAAPSSSTSSSHLMHHHSNNYPSYTNPSASSSNHSNMGHPNASTGQTSAVQRMDPFNQIPSELYGSASSTSIAASTRQPSSQSQPSQQFRQMPADLGASTSTMHSVAPIDIYDNYGNASTSDLRRSSVRGDPRRKEIYAYNAPFTLFSHGWSAATDPSRKFRLAVSSFIEEYSNKIHIVQLDEEAGELVHRSTFDHPYPATKIMWIPDQKGTFPDLLATSGDYLRLWRIGTDNNACIESLLNTNRTAEYCAPLTSFDWNELDMNLIGTSSIDTTCTVWQLETGQAIGTTRPTAAIDGTVRTQLIAHDKEVFDISFSRGSAQIFASVGADGSLRLFDLRRLEHSTIMYEDPQRQPLLRLAWNRNDHNYIATFGQDSKEVLILDLRLPCTPVARLRNHEATINGLSWAPHSGSHICTAGDDYQALIWDVHEMPKPINDPILAYRAQAEVNQIHWSSSFPDWISICSDNKLEILRV

SEQ ID NO: 24144 - protein, 407 aa, Caenorhabditis elegans
MDPFNQIPSELYGSASSTSIAASTRQPSSQSQPSQQFRQMPADLGASTSTMHSVAPIDIYDNYGNASTSDLRRSSVRGDPRRKEIYAYNAPFTLFSHGWSAATDPSRKFRLAVSSFIEEYSNKIHIVQLDEEAATKIMWIPDQKGTFPDLLATSGDYLRLWRIGTDNNACIESLLNTNRTAEYCAPLTSFDWNELDMNLIGTSSIDTTCTVWQLETGQAIGTTRPTAAIDGTVRTQLIAHDKEVFDISFSRGSAQIFASVGADGSLRLFDLRRLEHSTIMYEDPQRQPLLRLAWNRNDHNYIATFGQDSKEVLILDLRLPCTPVARLRNHEATINGLSWAPHSGSHICTAGDDYQALIWDVHEMPKPINDPILAYRAQAEVNQIHWSSSFPDWISICSDNKLEILRV

SEQ ID NO: 24145 - protein, 388 aa, Caenorhabditis elegans
MATNGHAVNGEAHVMQQVAQQPAPPGPLAPQGIGRQNEIVIGGRDRRCEIYKFTSDQQLYASAWSNKNDIKFRLAVGTVSDVSVNPCAANKVSIVQLKDETGELVETASFPMEFPANAVGFIPDPDNVYPDLIATTSDCLRLWRVVDGKVHPDAVMINNTNSQYGSALTSFDWNELEPRYIGVSSVDTTCTIYDVEVGCAIGQTKPTAPFTLKTQLIAHDKPVHDIEFAKINGGRDHFATVGADGSARMFDLRHLNHSTIVYEDPNKEKLQRLSWNKQEPYFMALFAENSQEVQILDIRMPCNILCRLRNHTGPVNGIAWAPHSPHHICTAGDDSQALIWDLQQVPRPVDDPILAYSAGGEVNQIHWGPVHSNWIAICFNKTLEILRV

SEQ ID NO: 24146 - protein, 343 aa, Drosophila melanogaster
MSSTAGKRKEIYKYLAPWPLYSMNWSVRPDKRFRLALGSFIEEYNNKVQIISLDEDTSEFSAKSTFDHPYPTTKIMWIPDSKGVYPDLLATSGDYLRVWRAGEPDTRLECVLNNNKNSDFCAPLTSFDWNEVDPNLVGTSSIDTTCTIWGLETGQPHARVYVAGHVKTQLIAHDKEVYDIAFSRAGGGRDMFASVGADGSVRMFDLRHLEHSTIIYEDPAHTALLRLAWNKQDPNYLATVAMDSCEVIILDVRVPCTPVARLSNHRACVNGIAWAPHSSCHICTAGDDHQALIWDIQQMPRAIEDPILAYTAAEGEVNQIQWGATQPDWIAICYNKACEILRV

SEQ ID NO: 24147 - protein, 153 aa, Drosophila melanogaster
MFASVGADGSVRMFDLRHLEHSTIIYEDPAHTALLRLAWNKQDPNYLATVAMDSCEVIILDVRVPCTPVARLSNHRACVNGIAWAPHSSCHICTAGDDHQALIWDIQQMPRAIEDPILAYTAAEGEVNQIQWGATQPDWIAICYNKACEILRV

SEQ ID NO: 24148 - protein, 342 aa, Xenopus laevis
MSLHGKRKEIYKYEAPWTVYAMNWSVRPDKRFRLALGSFVEEYNNKVQLVGLDEESSEFICRNTFDHPYPTTKLMWIPDTKGVYPDLLATSGDYLRIWRVGETETRLECLLNNNKNSDFCAPLTSFDWNEVDPNLLGTSSIDTTCTIWGLETGQVLGRVNLVSGHVKTQLIAHDKEVYDIAFSRAGGGRDMFASVGADGSVRMFDLRHLEHSTIIYEDPQHHPLLRLCWNKQDPNYLATMAMDGMEVVILDVRVPCTPVARLNNHRACVNGIAWAPHSSCHICTAADDHQALIWDIQQMPRAIEDPILAYTAEGEINNVQWASTQPDWIAICYNNCLEILRV

SEQ ID NO: 24149 - protein, 342 aa, Homo sapiens
MSLHGKRKEIYKYEAPWTVYAMNWSVRPDKRFRLALGSFVEEYNNKVQLVGLDEESSEFICRNTFDHPYPTTKLMWIPDTKGVYPDLLATSGDYLRVWRVGETETRLECLLNNNKNSDFCAPLTSFDWNEVDPYLLGTSSIDTTCTIWGLETGQVLGRVNLVSGHVKTQLIAHDKEVYDIAFSRAGGGRDMFASVGADGSVRMFDLRHLEHSTIIYEDPQHHPLLRLCWNKQDPNYLATMAMDGMEVVILDVRVPCTPVARLNNHRACVNGIAWAPHSSCHICTAADDHQALIWDIQQMPRAIEDPILAYTAEGEINNVQWASTQPDWIAICYNNCLEILRV
